United States Patent Application Publication US 2023/0172999 A1 - sequence listing, part 11

SEQ ID NO: 12 - DNA, 3781543 bp, Roseburia hominis (residues 1-1,890,772 of 3,781,543)
  misc_feature (692547)..(692556): n is a, c, g, or t
  misc_feature (837813)..(837822): n is a, c, g, or t
  misc_feature (901933)..(901942): n is a, c, g, or t
  misc_feature (1031578)..(1031780): n is a, c, g, or t
  misc_feature (1085168)..(1085177): n is a, c, g, or t
  misc_feature (1453511)..(1453668): n is a, c, g, or t
  misc_feature (1750746)..(1750755): n is a, c, g, or t
  misc_feature (1811995)..(1812004): n is a, c, g, or t
  misc_feature (1842267)..(1842276): n is a, c, g, or t
  misc_feature (2156018)..(2156027): n is a, c, g, or t
  misc_feature (2164406)..(2164574): n is a, c, g, or t
  misc_feature (2312340)..(2312349): n is a, c, g, or t
  misc_feature (2323926)..(2324112): n is a, c, g, or t
  misc_feature (2462991)..(2463160): n is a, c, g, or t
  misc_feature (2511696)..(2511705): n is a, c, g, or t
  misc_feature (2789043)..(2789052): n is a, c, g, or t
  misc_feature (2872345)..(2872354): n is a, c, g, or t
  misc_feature (2888925)..(2889088): n is a, c, g, or t
  misc_feature (2988230)..(2988239): n is a, c, g, or t
  misc_feature (3016170)..(3016179): n is a, c, g, or t
  misc_feature (3080518)..(3080527): n is a, c, g, or t
  misc_feature (3217373)..(3217557): n is a, c, g, or t
  misc_feature (3732997)..(3733006): n is a, c, g, or t
  misc_feature (3777260)..(3777269): n is a, c, g, or t
aaagaagatcgtattcaattttcctgtgcctgttgatggtgaggaagtgaaagaacttcccttggaaactgaaacaactgtcgagacggtagttcttttgtcccacaaaaaagccgacagttatatccacattgatgtggagtttggagagggcgagggcaagattccggtagatagtattgctaaaagagccgaagcgtacaagcccaaagaaaaagtgacctacaaaatgattaaggagtacatagaagcgaaatacggcttcaaggtacataccgcatatatcgcagaggtaaagcgaaatttgggattgccgatgtatgatgctcctaacgcagtagaggaattgaaacagccgaggaagcatccgacaccagaaaaggtagaagcaatcaaagatgcacttcgttattttgcagtgatataaaactttacttacaatcgaatatttcttacatagccgtttattcatttatttgagtaagcggcttttttcatccctatttttcggaataaggatattttttgtagaaggaggaggtttatttgaacacacagatcatcgccattgccaaccagaaaggcggcgttggcaagacaacgacctgtgccaacttgggaatcgggctggcgcaggccggaaagaaagtccttctgatcgacggggacccacaagggagcctgacaatcagcctgggaaatccgcaaccggacaagttgccatttacattgtccgatgcaatgggcaaaattctgatggatcagcctatacgcactggagaaggtattctgcatcatgcggaaggcgtagacctgatgcctgcggacatccagttatctggtatggaggtatccctggtaaatgccatgagccgtgagactatcttgcggcaatatctggacacgctgaaggggcaatattcccatatcctcatcgactgtcagccctctctgggtatgcttacggtcaatgcgctggccgctgcgaacaggatcatcattcccgttcaggcggagtacctgcccgccaaaggactggaacagctgctctctacggtaaacaaggtaaagcggcagatcaatcccaagctccagatagacggtatcctgctgacgatggtggacagccgaaccaactttgccaaagagatctccgcgctcctgcgggagacctatggcagtaagatcaaggtattcggcacagagatcccccattctgtccgggcaaaggaaatcagcgccgagggaaaaagcatttttgcccatgatcccggcggcaaggtggctgaaggctacaaaaatctgacgaaggaggtgttgaaacttgaaaagcagcgcgaaaaaaatagagctggcctcggtagatgatctgttttccaccgaagaaggccgtcaggatgcaaagctggagaagatacaggaaattccgctgtctgagctgcatccgttcaagaaccaccccttcaaagtcaaggatgacgaggccatgatggagaccgctgacagtatcaagcagtatggcgttctggtcccggcgattgcccgaccggacccggagggcggttatgagctggtagccggacacaggcggcacagagccagtgagctggcagaaaaggagaccatgccggtcattgttcgggatttggatgatgatgccgctacgatcattatggttgacagcaacttacagcgagaaagcctacttcccagcgaaagagcctttgcctacaaaatgaagctggaggctatgaaacatcagggagagcgagttgatttaacttcgtcccaagttgggacgaagttgagagccgatgaaatattggctcagcaggctggttcgagcagaaatcaagttcagcgctatatccgtctgacagagctgattcctgaattgatggatatggtggatgaaaagaagattgccctgaaccctgcctatgagttgtcctttctcaaaaaggaagaacaggtagacctgctggacgcgatggacagcgaacaggctaccccttctctttcccaagcccagcggctcaagaaatacagtcaggaggggtatctgaccctcgatatgatgcgtgtcatcatgggagaggaaaagaaaagtgatctggaccgagtgacatttacctctgacaccttgcggaagtatttccctaaaagttatacgccacagcggatgcaggaaaccatcatcaagctgctggaggcatggcagaaaaagcgtcagagagaccaggaacgatgaaaggagccgcctatgagggatatttcagcccgtgagctgaaaggacacaacattctcgccgtagagaggttttgggataacacccgctggatgattgagttttctgtcctgcgtcccagcactgcttatggcagccccggagatgaaatgcggctgtttttgactgaggacgggtatcagacagccctgcaaagccagcagcgcaaggagattaagattaagcgttacgctcgtgtgattgagggacatatcctcgatttcaaaccgggaaaacgccgccgctcataaacccatacaacgaaaggaaaggaatgactatgtgtacagtaaaggaaattcaggaagcaatccgggaagattgcagatcccaacatgacatggattcaacggatattgaccgcgtgatgcaaacacttcctttcgctcaggaggaaccatttacaggggcgcgtccccaaaagccgctgttttggttttatgcgagaaaatttgaaaagcgttgaacaccgcaattctttgaaatgaggattgcggtttttttgtacccaaaattcggaaggagtgaggtcgatggccgtttttcgcattgaacggacccgtgattataccgtgatgagcaatcatcatttacgaaatgcaaacttgtcgttaaaagccaaagggctgttatccatgatgctgtctttgccggaggactggaattacaccacccgtggccttgcaaagatctgtaaggagggcgtagatgccatcggtgctgccctgcgtgaactggaaggagccggatatatcgtgcgccatcagagacgcgataaaagtgggcggatcacagataccgagtatgtcatctatgaacagccccagccggatctgtctcagccggatacggcttcaccagatacggaaaacccggatatggtaaaaccggatacggaaaagcccgcagaattaaatatagagaaatcaaatacagaaaaatcaattacttatggatcaagtaccgattccattcccttccgggaaacagcggcggcaggaccgccggaacggaaaggaagggatgcgatgtctgtcacagagatagaaaattatcgggagttgattttggagaatatcgagtacgactacctgtgcagggagtttgccacctatcgggaggatttagacgagatcgtggagctgatggtggaaacagtctgtgccagacgcaaaaccacccgtatcgctggcagcgactttccccatgaggtggtgcgctcccgttttttgaagctggacagcgaacatatccggtttgtcatggacagcttgcagaaaaacaccaccgaggtccgcaacatgaagcagtacctactgacagtgctgtttaacgcacccaccaccatcagcaaccactacacttcacaggtcaatcacgatatgaacgcagacggctggtaaggccgccttttatcatgccaaaggaggcacgacatgaaccagatggaaattttcaaaaacccggagtttggtagtatccgtgtcattgaggaaaatggcaaatatttgttcagcggaacggatgtggccgctgcgctggggtacagcaatccccgcgatgcaattatccgccattgtaggtatgtcgtgaaacgcgacgcacctcacccacaaagccccgaccgcaaaatcagtatgacgtttatcccagaaggcgatttgtaccgcctgatcgttcacagcaaattgccatcggcagagcagtttgaacggtgggtattcgatgaggtcctgcctaccattcgtaagcacggggcctatctcacaaaagagaagctgtgggagattgccacttccccggaagcactgatgaagctctgctcagacctgttggctgagcgtgaagcaaatatttctctgcgtaaggaaaatgcacagctggagggcaaagccgctttctatgacctgttcatcgacttaaagcacagcaccaatctcagaactaccgccaaagagttggatgtcccggagcgccggtttgtccggtttctgatagaacggcgttttgtgtaccgcacggcatccggcaatgtgctgccttatgccaatgtgaaaaatacagggctgttttgcgtcaaagactactgcaaccacggtcatatcggttcctacacgctggtcacgccccaaggcaagctctattttgcccagctgcgggaaatgatcttgctggtctcataagaaaggaagtgggttttatgcaggaaggcaaaacaatcggtcagctgatggaggaaatgcgccagaaagctggggcgcagaactaccacggccatgactacatggatctccagcgatttgcggagaacacccggcacatgattatttttgatgtgctgacgcatgattccccggtgggctggaaaggagaacgcacccgcctgtttttgtcagatataggctatgaaaaagctctggacagtcaagcgaaagggcagattaagattttgagccacgcaaaggtgtgtcagggcaatctgcactatgaccgtactgaccagttacgctaaggagggcgttatgaagcgttatcttctgcggcggctggtggttccgccttagcaaaaaatgagattccctgcaaacttcgtggaaaggaggagagaaaatgcaggaagaagtggaaaacagaactttgacgctggttgtcagtggaacaaagtttaccggcagaatgtttaaggctgccataagcaagtacatggcacatcgcaaggaaaagaaactgcaaaagcagagaagccgtgatgcgccggttattccgcacggaaaacagactgtgaagcagcttgtcgggcagaatcagggaatatccaatattgagatcacagacccctctatcaaggagtttgagaaaatcgcccggaaatatggtgtggattatgcggtgaaaaaggatcgtagcagttctccaccaaagtacctgattttcttcaagggtcgcgatgcggatgcgctgacagcagcctttacagagtacaccaataaaaaggtcaaaaaggcaacgaaaacagagcgcccgtctgtactggcaaaacttaaccagttcaaagagatggttaaaaatgctgtggtggatcgcaccaagcgaaaggagctggaacgatgaaaaagcagtttgacatcaaaaagctcgttttgctgaacctgccctatcttctgatggggctgtttgctaccaacttcggagaggcatggcggttggcacagggggcaaatgcttcagagaaattcctttccctgtttgctgtccttcctggggcgctgcaaagtttctggcccagcctgcacccgttggatctgctggtggggctgtgctgcggtgccggcctgcgtctggcggtatatctgaaaagtaaaaatgcgaagaaataccgccacggcatggagtacggctccgcccgatggggaacccatgtggacatcgcgccctacatcgacccggtgttccagaacaatgtgattctgaccaaaaccgagagcctaaccatgaacagccgccccaaggaccccaagaccgccagaaacaaaaatgttctggtgatcggcggctccggctccggtaagacccggttttggctgaaacccaacctgatgcagatgcacagctcctatgtggtcacagacccgaaaggaaccattctggtggagtgcggaaaaatgctccagaggggcgcgcccaagctgggcaaggacggcaaacccatgaaggataagcgcggtaaggtcatttatgagccgtaccggattaaggtcctcaataccatcaacttcaaaaagtccatgcactacaatccttttgcctatctgcacagcgaaaaagacattttgaagctggtaacaacgctgatcgccaataccaaaggcgaaggcaaggccggagacgatttctgggtaaaagcagaaaccttgttgtactgcgcgcttattggctatatccattatgaggctccggtggaggagcagaacttctctaccctaattgagttcatcaacgccatggaagtccgtgaggatgacgaggagttcaaaaaccccgtagacctgatgtttgatgcactggaagccgagaagccaaatcactttgcggtgcgccagtataagaaatataagctggccgccggaaaaacagccaagtcgattttgatttcctgcggtgcgcgtcttgccgtatttgatattgcggagttgcgtgaggtcacagcttatgacgagctggagctggatactttgggagaccggaaaactgccctgtttctcattatgagtgatacagatgacagctttaacttcctgatctccatgtgttatacccagcttttcaatctgctctgcgaaaaagccgacgatgtgtatggcggcaggctcccagtccatgtgcgctgtctcattgacgagtgtgccaatatcgggcagattccgaagctggaaaagctggtggcaaccatccgaagccgtgagatctccgcctgtctggtgttgcaggcgcagagtcagctcaaggcgatctataaggacaatgcagataccatcatcggcaacatggatacttccattttcctgggcggtaaggagccaaccaccctcaaggagctggctgccgtgctgggtaaggaaaccatcgacacctacaacactggagagagccgtggccgagagacctcccactctctcaactatcaaaaattggggaaagagctgatgagccaggatgagcttgcgacgatggacggaaacaagtgcatcctccagctgcgtggcgtgcgtcctttcctttcggataagtacgacattaccaagcaccccaatttcaagtacactgccgatgcggatgacaagaacgcttttgacattgaagcattcctgtccgcaaggctgaaactcaagcccaatgaggtctgcgatgtatatgaagtagacacaaagggcgcttaacttcgttccgcttttgaaaggagtgatcttatctattcgccgcacctgccctctacgggccattggcgtacaaagcggacaatcgcaagaaaaataatgaaaaaggaggacagccggaatcatgcccccggaaaccgggcggcagattgttccggcttttgtatgcctatgaaacatgacaaacctaatttttaatcagattccggctaacaaactatatggcattttttgaacaggcaatcaccgttcttcagaccctcgttatcgcgctcggtgccggtctcggtatctggggcgttatcaacctgctcgaaggttacggcaacgacaaccctggtgcaaaatcacagggcatgaagcagctcatggccggtgctggtgtagccgtagtcggcatggtccttgtacctctgctctccgggctgttctctgtctaagcgtccctgcatgaaatccttgccgctcccgcagttttgcgggggcggcggaaaggaggttgacaccgtatggatttcttacttgaagccctgacaaattggctgaaagaaatgctggtgggcggtattatgagcaacctttcggggatgtttgacagcgtaaaccaacaggtcgcagatatatccgtacaggtaggccagacaccacagggatggaatggcagtattttcagcatgattgagaatctgtccaactccatcatggtgccgattgcaggcgtgatcctggctattgtgatgaccgtagacctgatccagatgatcgcagacaaaaacaacctgcatgatgtggatacctggatgattttcaagtgggtgttcaaatcagccgccgccatcctcattgtcacaaacacatggaatatcgtgatgggcgtctttgatatggcgcagagcgtggtggcacaggcggcagggatcatcaattcggatgcgtctattgacatttcctcagttatgaccgatctggaaccgaggctgatggaaatggatctgggaccgctgttcgggctgtggttccaatccctctttatcggcattaccatgtgggcgctgtatatctgtatctttatcgtcatttatggccgtatgatcgagatttatcttgtgacttcggtggctcccgttccaatggctgccatgatgggcaaggaatggggcggtatgggacagaactacctccgctccctgctggcgctgggctttcaggcgtttctcatcatcgtctgcgtggcaatttatgctgtgctggtgcagaacattgctctggaagatgacatcatcatggcgatctggagctgcgtgggatacaccgtactgctgtgctttacgctgttcaaaaccggcagtctcgccaaatcagtctttcaggcgcactaaaacggaaggaggtttctacattggcttatgtacccgtacccaaggatttaacaaaagtcaaaacaaaggtcatgttcaatctgaccaagcggcagcttatctgcttcacgggcggagcgcttattggcgtaccgcttttctttttgctcagaaaacctaccggaaacagtgtagcggctatgtgtatgatgctggttatgctgcccttctttatgctggctatgtacgaaaagcatggacagcccctggaaaagatcgtgggcaacattctcaaagtagctgtgatccgtccaaagcagcgaccttaccagaccaacaacttttatgccgtattaaagcggcaggaaatgctcgataaggaggtgtatgacattgttcaccgcaatgaaaagctggctgcgccgtctgctgggaaaaccggaagaaaagaccgtgcagccggtaaagacaaagaaaaagctgtcccgcgccgataagaagcagattgaagcggccattgcccgcgccaaccgcacggacaaaaaaggaaaatcggcacaggacagtatcccctatgaacggatgtggccggacgggatctgccgtgtatcggacaaccactacacaaagaccattcagtttcaggacatcaactatcagctctcccaaaatgaagataagaccgcgatctttgagggctggtgtgatttcctcaattatttcgacagctcgattcactttcagctgtcttttttgaaccttgctgcatcggaggagacctttgcaaactccatttccatcccgccccagggggatgactttgatagtatccgtgaggaatacaccacgatgctgcaaaatcagctggccagaggaaacaacggtctcatcaagaccaaatacctgacctttggtatcgacgctgacagcatcaaagccgctaagccccgtctggagcgtattgagactgatatactcaataacttcaagcgtctgggggtagccgccagaacactggacggtaaggaaaggctttcccagcttcatgcggtattccacatggatgaacagctcccgtttcagtttgaatgggattggctggctccttccggtctgtccacaaaagattttatcgcaccaagctcctttgagttccgcaccggcaagcagttccgtatgggcaagaaatacggggctgtttcttttttgcagatccttgcaccggagctgaatgaccgtctgctggctgattttctggatatggaaagctcgctcattgtgagtatgcacattcagtcagtggatcaggtgaaagccattaagacggtaaagcgcaagattaccgacctggaccgcagtaagatcgaggaacagaaaaaagcagtccgtgccggatacgacatggacatcattccctctgaccttgccacctacggcagtgaagcgaaaaagttgttgcaggatttgcagagccgcaatgagagaatgttcctggtctcctttttggtgctgaacacagcggacaatccccgtcagcttggtaacaacatctttcaggcaggctctattgcccagaagtataactgtcagctgaccagactggactttcagcaggaagaagggctgatgagctgtctgcctctgggactcaatcagatcgagatccagcgaggtctgaccaccagttctacggctatctttgtaccgttcaccacacaggaactgttccagaacggcaaagaagccctgtactacggcatcaatgctctgtccaacaaccttatcatggtggacagaaagctgctgaaaaaccccaacggcttgatacttgggacacctggaagtggcaagtcctttagcgcaaaacgagaaattgccaactgctttttgcttaccaatgatgatgtcatcatctgtgatccggaagcggagtacgcacctcttgttgagcgtctgcatgggcaggtcatcaagatttcgcccaccagcagcaattacatcaatccaatggatttgaacctggattactcggatgatgaaagcccgctgtccctcaagtctgattttatcctcagcttgtgtgagctgatcgtgggcggtaaggacggattgcagccggtgcagaaaaccatcatcgaccgttgtgtgcgtctggtctatcagacctacctcaatgacccgcgcccggagaatatgcccatactggaggacctatataacctgctccgttcacaggaggaaaaggaagcccagtatattgccacggcccttgaaatctatgtaaccggctccctcaatgtgttcaaccaccagagcaatgtggacatcaacaaccgcattgtctgctatgacatcaaggagctgggtaagcagctgaaaaagatcggtatgcttgtggtacaggatcaggtatggaaccgagttaccatcaaccgtgccgcccacaagtccacccgttactacatcgacgagatgcacctgcttttgaaggaggagcaaaccgccgcctatacggtggaaatctggaagcgattccgtaaatggggcggtattccgacaggtatcacccagaatgtcaaagaccttttgagcagccgcgaggtagagaacatctttgaaaactcggacttcgtgtatatgctcaaccaggcaggcggagaccgtcagattttggcgaagcaactggggatttccacgcaccagcttagctatgtgacacactccggtgagggcgagggcctgctgttctatggctccacgatcctgccgtttgtagaccacttcccgaagaacaccgaactttaccgcattatgaccaccaaaccccaggaactgaaaaaggaggatgagtaatgatgaatcccaacattttgaataaaaatccgctgatgttttttgacagggcggtaaatgcccagcgcagccagctgcttacggtcatggccgatgcggtaagtgagtgccgcacggcggcagatcaggcagccgaactgaatgagaccggtcaggtggggcttctccgtctggcagaggtctggagcgccattcgtgctaaagaaggtatgggcggcctgattctggaaggaacagaggcgaagatcctgtccgatgtggtggcacagttttatgcctatctgtccggctgtatgttcaacgatcctgtgggaatggccatttatgcagagctgcactacatgatgtcctccctcatgctgggagaatggtttgaataaagagccgcgcctgcgctttactgatgaggaacggtctgaccctgcactggaaaagccgatccgtaaagcggagaaagctgcggccagagcagataaggcgcaggccaatatcccaaagaaaaaggtcaggcagacggtcattgacccggataccggaaaaaagacctcgaagctgacctttgaggacaagaaaaagccaccttccaaagtttctcaaggagtcagggaagctcccgtccatctggtcgcaggcaagctccacaaagagatccgggaaacagagcaggacaatgtaggcgtggaaagcgcccataagtccgaggaagcggtggagaccggcgcttatctggtgcgggagggctatcgcagccacaagctgaagccgtaccgcaaagcagcccaggcagagcgtcaactggaaaaggcaaatgtaaatgttctgtaccagaaatctttgcaggaaaatccccagtttgccagcaaccctctttcccgctggcagcaaaagcaggccatcaaaaagcagtatgccgccgccaaacacgccggtcagactgccggaaataccgcccaggctgcatccaaaaccggaaaagccgcaaggacggtaaaagaaaaggtacagcaggcaggggcattcgtcatgcgccacaagaagggtttcctgatggcaggggttttgttcctcattacctgtatgctgatgaataccatgtcctcctgctccatgatggcgcagagcatcggttccgttctctccggcaccacctatccgtcggatgacccggaaatgctggcggtggaggcagattatgcagccagagaagcccagttgcaggaggaaatcgacaacattgaaagcagtcacccagggtatgacgagtatcgctatgaccttgctatgatcggccatgaccctcatgagctggcagcatttctctctgccgtcttgcaaggttacacccggcagagcgctcaggcagagctggcgcgtgtgtttgcagcacagtatcagctgacgcttactgaggaagtggagattcgctaccgcacggagacctcaaccgacccggagaccggcgagaccacctcagaagaagttccctatgagtattacattttgaatgtgaaactcgccagcaagcccatttccgctgtggcgtcggaacttctgaccccggagcagatggaaatgtatcaggtttaccggcagaccatgggcaataagccgctgttgtttggcggcggctcccctgataccagcggttcggaagatctgtccggtgtgcagttcattaacggtacccgccccggcaatcctcagctggtggaactggccaagcgtcaggtgggcaatgtgggcggttatccctactggagctggtacggctttgactcccgtgtggaatggtgcgcctgcttcgtatcctggtgctataaccaggcaggaaaaagtgaaccgcgctttgcaggctgtgagtggcagggcgttccgtggttccagtctcatggacagtggggcgcaagaggctataacaatctggctcccggagatgcaattttctttgattgggatttagatgggacagcggaccatgtgggtatcgtgatcggtacggatggcagccgtgtttatacggtggagggaaattccggcgatgcctgcaagatcaaaagttatgacctgaattatcaaagtattaagggctacggcctgatgaactggtaacagattttgtggaaaggagtgaacggttatggcaaaaaataaaattgaacgtatcgaccaggaaattgagaaaacccgtgagaagattgcggaatatcaggaaaagctcaagaccctggaagcacagaaaacggaggcagagaatctggaaatcgttcagatggttcgtgcgttacgcatgactccagcacagctgaacgctatgctttccggtggaatgaaccacggcagagatacagcactgtcggaatcaaataatcaggaggttaccgcttatgaagaataaaagaatttgcaaaacactttccgccctttgcctgacaatggttgtggcatttggctttacgatccctgctttcgcacaggggtcagaacaggctccggcggcaccggcagaggattctaccaatgacagcaatgtgattgtggaagaaacagaaccggcaccggcacttacaccggaggggaatgcggcattggtggatgattttggaggcaataagcagcttattactgttacgaccaaagctggaaattacttttacatcctgattgatagggcgaatgaggacaaggagactgctgttcactttctgaatcaggtggacgatgcagaccttgcggcgctgatggaagatggaaaacccaaagaggagatgcctgcggtatgcagctgttcaacaaaatgtgaagcaggggcagtcaatacggcctgcccggtctgcgcaactgataagagtaaatgtacgggaaaagcaccggaacctccggcagaaacaccggagccggaaaaagagaagcctgccggactgaacccggctgcgctggtccttttgctggctctgctgggcggcggtggcgtatttgcctacttgaagctcgttaagaataagcctaagactaaaggcaatgacagtctggacgattatgattatggcgaggaagattccgaggaatgggaaaccgaggatgaggagtcgggcgagccggacgctgatgggggcagcacagaagaagatgacgaggacagcgtgaaatgacccgtttcacagacagtccctatgaacgaatgatgacacgcaggccggagggcgggaaggaaacttcccgtcctccctctttgccccaaagccacccctgttatggctgcgggaattatggaagtccctgcgtaggtgtttgccaccgtgagatggaacgctggttcaaagaaaggaaacgaaaaaaatgagtgttctgattatatttatcaagctgattgctgtttttgacctgctggtaattgctgtgtattttggcggcgatattctttctaccgtgttaaacaaactccggagaaaaccgaagcaggaagattcctttgatttttccctggatgccgcaacggttcccttgtccatagattccatccgtcagctttattcaggagacgcggcggattttgtggaagaaaagatcctgccaaatgcggagaaaacaatggccgtgctgacggaacaagaacagacggcggctcgtctgctcttatccgctttgatcggttttcttgcagcagaagctcctatggatgaacagagctttcctttgatgatggaacttctgaactgcatggaaggggaaaaagaagatggttgtcaggatgcagtagatagtttacttgaagatgccgcctgcaatacccgccgtcacgaagaatattacagcaattatcaacgctaccagctgatgcaggtggataaaacccgtgtcattttggcttgccgtatcatcatcaatgacctgctggggaaactgtaccgctatgactaccggtttggttataacctgctactggatgaggaaaacagcatagagaaaaaactgcacacgcctgtgcgggaagaatgggaggctgaagatgatgagatataaactggtaatcgctgaaaaaccatcggttgcacaaagtctggctgcggtaatcggtgcaaccgctcgtaaggacgggtatttggatggtaacggctggcgtgtcagctggtgcgtgggccatctggccggtcttgcggatgcagacagttatgatcccaagtatgccaagtggcgatatgatgacctgcctattctgccggagcattggcagatggtagtgggaaaggataagaaaaagcagtttgatattctcaaaaagctgatgaacgccccggatgtgacggaggtagtaaatgcctgtgatgccggacgcgagggcgagctgatcttccgcagcgtctatgagctggcaggctgtcaaaagccgatgaaaaggctctggatttcttcgatggaggactctgccataagggagggctttgcaaacctgcgccccggtgcggactatgacggacttcgggatgctgccctctgccgtgccaaggccgactggctggtgggaatcaatgcgacaaggcttttttccgtgctgtatcaccgaaccctcaacatcgggcgcgtgatgtccccgacgctggcgcttattgttcagcgagaagctgagatcgacacctttcagccggtccccttttataccgtggcgctggagctgcccggtcttaccgtatccggagagcgcatggcggataaagctgctgccgaacaactgaaagaagcctgtcagggtgcaaatgtcacaatcaaaaaggtggagcgcaaggaaaagtccgaaaagccacctgccctctatgacctgactaccctgcaaagagatgccaaccgtctgcttggatttacggcccagcagaccttggactatctgcaaagcctgtatgaaaagaagctctgcacctatccccgtactgacagccgctatctgaccggtgatatggcagacagcctgccggtgctggtgaatctggttgccaatgctatgccgtttcggaaagggatcgccatttcctgtgatgccggtgcggtcatcaacgataagaaagtaaccgaccaccacgcagtaattcccacccgaaatctcaaggatgcagacctttctgcccttcctgcgggagaaaaagcagtgctggagctggtggccctgcgcctgctgtgcgccgtggcccagccccatatctattcggaaaccgttgtgattgcagcgtgtgccggtgggaaatttaccgccaagggaaaaacggtgaagcaccccggatggaaagcactggaggacgcttaccgtgccaaaacgaaggatgcagagccgaaaaaagagggtgcagagaaagccctgccggagctgactgaaggacagaccctttcggtttctgcggcaatcgtcaaagaaggcaaaagcagtccgccccagcactttacggaggacaccctattgtccgcgatggagactgctggaaaagaggatatgccggaggatgccgagcgaaaaggtctggggacaccggccacccgtgccggtattttggaaaagctggtatctgccggttttctggaacgaaaaaagagcaggaaaacggtgcagcttctcccttcccacgatgcagtttccctgatcaccgttctgccggaacaactgcaatcgccgcttctgactgccgagtgggagtaccgactgggcgagatcgagcgcgggcagcttgccccggaggagtttttggacgggatcagcaccatgctgaaagatctggtggggacttatcaggtcatcaagggaactgagtacctgttcactccgccccgtgaggtggtgggcaaatgccctcgctgcggcggtgaagttgcagaactgcaaaaaggcttcttctgtcagaatgattcttgcaaatttgcaatctggaaaaacaacaaatggtgggctgccaagaaaaaacagccgaccaaggctgtggtgtctgcactgcttaacgatggccgtgtccgtgtgacgggcctatattcggagaaaaccggaaagacctacgatgccgctgtggttttggaggatgatggacagtacgccaacttcaagctggaatttgaccagcggaaaggaggcagccgatgaagctctctttagtggaacgggaaaccattctcctctataaccaggcagaaccaatggctgagatctatactcatgatccccgtctgatggagaaactggatctgctggcaaaaaagcaccccgaccagatcacccgaaaggacgcccataactttaccgtccccaagcggtgtgtatcagtccgggagccatatagcgcagaacgccgcaaagccgccagtgagcgtgcgaaagccgccggataccagcctcctatgcgaaagtccgacagttaaaggcacatgacagagaatgtatttgaagcagtcaagcagtcggtcagcaccagagatgcggcagcgttttatgggatcgaggtcaaacgaaatggcatggcctgctgtccctttcacgatgataagaacccaagcatgaaggtagaccagcggttccactgctttggctgcggtgaagatggggatgtgatcgactttaccgcaaagctctttgacctctcctcaaaagaagcggcggagaaactggcacaggactttggcctgatctatgacagtcaggcccctccccgcaggagatatgtccggcagaaaaccgaggcacaaaagtttcgggaggaccggcagcggtgttatcgcgtactgtccgattactactatctgctgaaaaaatgggaggccgacaattctccccggacactggaggaagaaccgcacccccgttttgtggaagcaatccagaaaaaaacctatgtagagtacctgctggacctttttctgtatgaaagtgaagaagaacaaagggcatggattgcagaacacacagcagaaatcacacacttggaaaggagattgaaaatcatggctgagaacaaacccaccaaccgagagcggctaagggaaatcacagatggcatcgagcagggcatcaaagaactgtttgagagtgaaaagtatatgcgctatctgtccgttatgtcccgcttccaccgctattcggtaaacaacaccatgctcatctatatgcagaagccggacgccactttggtagccggatacaataagtggaaagaccagtttgagcgtcatgtaaaaaagggcgagcatggcattaccatcatcgcccccacaccgtataagaagaaaatcgaggaacagaagctggacccggataccaaggctccgattctggataaagacggaaagatcgtcacagaggaaaaagaaatcgaaatccccatgtttcgtccggtcaaggtctttgatgtgagccagaccgatgggaaacctttgccggagcttgcatcatccctttccggcaatgtgccaaattatgaggcatttatggaggctctgcgccgcagcgcaccggtgccaattacttttgaatcaatggccgccgatacggacggctatttttctgctgatcatcagaaaattgccattcgtcagggcatgagtgaggttcagacggtttcagccacagtacacgagattgcccacagcaagctccatgaccctaaaaaatatgaaatgctaccgtcatggaaggttgtgcaggagagtgaaggtggaaccaagcatgatttcaagttggattttgccacagaaaaagaagccgaacagtttgcttctgatatggattggtgttatgtggacgaaaatcagtttgaatggcgtcttgcagttgaggaagatgcaaccgcagaaaaacaggcaatcaaaaaccgtcacacggaagaagtggaggctgaaagcatctcctatgcagtctgcaaatattttggcatcgagactggagaaaacagcttcggctatattgcaagctggagccagggcaaggaactgaaagagctgagagccagtttggagaccatcaacaagacctccggcactttgatctccgacattgagcgccactataaggaaatctgcaaagagcgtggaattgaccctcatgcaaaggtagagccggaacccgccctgatagagcagccagaagatgccgctaaggtatctgatagacagcagaccggcgatctgacctactatgtagcagagtgcatggaatttccaaacctcggagaataccacgataacctgtctttggaggaagcaatccgcatttatcaggagattccggcagaacgaatgaacgggatcaagggcattggttttgagctgaaagacggaagcgactatgaaggaccttttccgattttgaccggccagaccattgacctggacaccatccaggcaatcgactattaccgtgataatcctctggtgcaaaaagcggtaaaggaactggctgcggcaatgccggaaatggaagtgctgggggcggacgccaatcagcaggaggctttgtttctgatcgacaatgccacctatcttcatatccagtcctgtgacagcggctgggactataccctttacgatgccgcatccatgaaagagctggatggtggtcagctggatatgccggagatttcccgcatgaaggcagttctccagatttgtgatgacaacgatttgggcagagactcggtaaaatacgcaccgttgtccatgattgagaccttgcaggacgctgcctatcagcagatgcaggcagaggtcagtcagatggctgcttcttcccagctgccggaagcacaggagcaggcactggatgaataccccatgccggatgagcaggtctccacaccagatatgcaggaatacggctactcctatgatgggatgttccctgttaccagagaacgggcgctggaactggatgccgccggtttgaccgtttatgtgctgcatgaggacaatacggagagcatggtgtttgacccgcaggaaatcatggatcatggcggtctttttggcgtggaccgtgaggaatgggagaaaagccctcagttccacgaaaaggtcatggagcgtcaggaacatcagcaggaacgcgaacaggcatttctatcccagaacagagattgctttgctatctatcaggtgagccgtgacgatccgcagaatgtgcgctttatgaatctggattggttaaagtcccatgacatttccatagaccgcagcaattatgacctcatttacacagctccgctgagggagtctggcacggtaccggagcagctggaaaaactatatgagcagtttaatctgcaaaagccggcggattttcacagtccttctatgagtgtcagtgacatcgttgcgatcaagcaggacggtaaggtatcctgtcattactgtgacagtgttggttttacccagatccccggattcctgccggaaaatccgttgaaaaatgcggagatggccgtggaggacgattacggcatgatcgacggtatcatcaacaatggcgcaaaagagcctacggtggcagagctggaacagcaggcccgcaacggtcagcccatttccctcatggatttggctaccgctgcccatcgggaggaacgggaaaagaaaaagtccgtcatggagcagctgaaaagccagcccaaggcagaacacaaaaagatagcgccaaaaaagagtgcggaaagggagatttgatatgggaaactttacttttgaggaaatgaacctgatgtgcatttacaataccggcagccgcaccggactgatcgacagcctgcgtgagatgcgcggcgagctggccccggaggaaaccgagctgcgggagttgacagacagcgcactgggcaagctccaggccatgagggatgccgagtttgccgagctggagttgtatccggattttgaccagtaaacactataatcgcagggatggggtggcaatatgccaccccacctttttaccccaaaactgaaaggaggacagaacactatgccaaccaaagctgaactatatgcacagatggcggagaaggtaacaacgcagctcacggggagctggcaggaatgggcagggtttctcaccactgcttcccgcctttacaagtacccgttccatgagcagttgatgatctacgcccagcgtccggacgccaccgcctgtgcagagtacgatttgtggaatgaaaagatgggccggtatgtaaggcgcggctccaagggaattgctctggtggacgattccggggacaggccccgcctgcgctatgtttttgatatttccgacactggaacccgtgaacattcccgcactccctggctgtggcagctggaggagcgccatttggattcggtgcaggccatgcttgagcgcacctatgatgtttccggtgatgaccttgccggacagctcaccgatgtagccggaaaactggctgaggaatactggacggagcatcagcaggacttcttctatatcgttgacggttcctttttggaggaatatgatgagtttaacatcggagtacagttcaaggcagcagccaccgtcagtatcacttacgctttgatgtcccgctgtggactggagccggaacgctacttcgaccacgaagatttcatggcgatctttgatttcaacaccccgtccaccatcggggcgctgggaacagcggtcagccagatcaaccagcaggtgctgcggcagatcggcgttaccgtccgaaatgcagagcgcgaagccaaccaagaaaggagcaagcaagatgaacaatcccatgacctacatccagaacggagactatcagattcccgacctggagctgagccagcagccggagaaacccctgggcaagtacggcaggatgaggaaaacctatctgaaggagcaccgtcccatcctctacaaccagatgctgatgagcgagaagctgtacccgcacctcatcgagatcgacgagaccgcccagagcagactggagcagatgatgccccagctggcgaaggaagcgggagccaccgaggaactgaaagccagcgatcccatgaagtgggtggggctgatgaacacctgcaaagcccaggccgaggaaatcctgatggcggagcttatcaacagctgactctaaacctgttcctctccgaagcggaacagatccaatccatagatgaagcagagaatgtagcgcatacatcctctgctttttcttttgcccaaaatgacattgaccatgtgctgcgtttgggaggcaatacagaccgtcagagggagcgtgtggttgcagcctttgaaaagcagaaaaccaccgctgagattgccgagatactgaaaacgctgtaccacggtggcaacggccttggcagtgtgagtgcatggtatgccgaggatggtatccatctttcccacgggaagtctgtccgttatgacaggtctgcccaggtcatttcttgggagcgcgccgcagagcgtatcggggagcttttggaaagtggtcagtttgcctctaatgtggagcttgcagaagcggcaggctatgaacgctccctcctctcggaaaagctctggcatctgtatcacgatctcagtgaggacgccagaaaagccggatatttgtcctgcctgtcagagatcaaaggcaatggtttcccggaggagacccgccgcctgacggagcagctgagtgacccggctttccgccagaccctcaaggaagaatacgccgccttctggactgcctatcagcaggaccgtgacctgttgcgttttcactatcatagaccgagggagatctgggagaacctgaaggaccttgaccttccacgcaggaccttttcttcagagctttcccaagtgccaaccgtccagcactttattaccgaggatgagatcgacaccgccatgaccggcggcagcagttttgccggaggaaaaggccgtatctatgcgttcttcatggaaaaccatacggataaggaaaaagtgagattccttaaagacgagtatggcattggcggacgctctcatgccctgtccggcgcaacacacagcggcgaagatcacgatgggaaaggactgcactataaaaagcaggactgcccggatgttcacttgaactgggaaaaggtttccaagcgcattacctcacttgtccagaaaggccgctatcttaccgaacaggaacaagcgcagtatgacaagatccaggctgaaaaggatctggcagaagaagatgccattcaagcccagcagccggagatagaggaagaaacgccaaagcctacccttcgggagcagtttgagcagtataagcctgtggtgactgccgccatatctgaggatgtggcatatcgaaatgcctgcggtcattccgaccgtgaaaatgctgtcatcgagggcaatgccgctgtgcgccgtgcggttcttggctctaaggatatggagctgatccgcctttattcggatgtgccggagttccgccagcgcctgcaccgggaagtgatcgacgaaacctatccaaagctccatgagcttctgcgccctctttctcaggaagatattgatactgccctttgtgcatggaacggcaatatcgagagtaaacacgctgtcgtccgttatatgaaagaccatgcaagagagaaggataccgctgcatggctggctcaggaatacggtggcagcaacagcccgttcgttgtccgtgccggaagcccggaggaaacacagctgccctggccgaaggtacagcgcaggcttgcccagctgattcaggaggaccggttctataccgaagaagaacaggaccgttttgacaacatcgaccccatcgccatccgggaagccctggaggaaagagggattgtcaacggacaggtggcagacccggaaaaactggacaatgactcatttatccagcaggtaatgtcggatgtagagcagatcgcagctgttgagacagagcagacttccgaagttgctatttccgatgaggaatatgacgcagttcgccgcccaattccgcaaagaatctcctatgacccagccgccccggtctatgccgtgggcgataccgtgtatatcgaggatgacgcctatcagattaccgagctgagggatgacaccgtacagcttctgcccaccgggatggtatatcccatctaccgggcagagcgcaaagaacagttcgagcagctgcttcgggcagaccgccgcaatgcttactataccgagtttcttcccattgacccggacaaggcagatcaagacttgcgggatgtattgtcccatggactgatggatgaagcggataaaaagcagatttccacgctgctgcaatccggcaggagcaacagcgagatcgcctactggctgagcagagcctattccggtgagatcgagacactgaatctggagactggcgatattgccgattaccgtaccacggcacagggcatagagctggaagtcatggatgcagaggaaaagcgtctggctatgctgtatttccgctgggatgaggttgcacctttgctgcgcgggatgtacgcccgtcagcaggacggtttgggacaggaacagtcccaaccggctgccgaatccccgaccttccattccgagaccatggccgtctatccgggcgataagaacaatctgccttatgatgtggtggtggaacgactgcatatcgaggagccggagccaccagcgcctgtgacagagccggagaaaacctttgaggaagtgctggacgaacacccggtttccattcaggtcaatggccagtggcagaccttccccaatgccaaagctgccgaggaagcatcttatgaggaatacaaggctaacctgcgccgcaatgcaaaaaacttccgcattaccgatgagcatttgggcgaaggcggtccgaaagccaagttccaggcaaatgtcaatgcgattcgtttgctgaaagagctggaagctgccggacagcaggcaagccccgaacagcaggaggttctttctcgatatgtgggctggggcggtctctctgatgcgtttgacccggagaaaccggcatgggcttccgagtatgcccagctgaaagagctgctgaccacggaggaatatgccgccgccagaagctccaccttaaacgcccattacaccagccctacggtcattcaggccatctatgaagcggtggaccgtatgggatttgagaccggaaatattctggagccgtctatgggtgtgggcaatttctttggtatgctgccggagaaaatgcgaaacagccgtctgtacggcgtggagctggaccctgtttccgggcgcatcgcaaagcagctctatcccaaggcagacatcacagtaggcggctttgagaccaccgataggcgtgacttctttgaccttgccatcggcaatgtacctttcggtcagtatcaggtcaatgacaaagcctacaacaagctgaatttcagtattcataactatttttttgccaaagcactggatcaggtgcgtcccggcggtgtggtagcttttgtgacctctcgatataccatggacgccaaggattccaccgtgcgccgctatcttgcccagcgtgccgagctgctgggagctatccgtctgcctaatgacgcgttcaaaaagaatgccggtgccgaggtggtatcggacatcatcttcctccaaaagcgggaccgcccgttggacatcgtgccggaatggacccagaccggacagacggaggacgggtttgccatcaaccggtattttatcgaccacccagaaatggtgctgggcagacaggagccggtaagcactgcacatggtatggactacaccgtgaaccctatcgagggactgaagctttccgaccagctgcatgatgctgggaagtacattcatggcacttatcaggaggcagagctgccggagctgggcgaaggcgaagctattgacacctccattcctgccgaccccaatgtgaagaactattcctatgccattgtagacgggcaggtgtactaccgggaaaacagccgtatggtgcgtcctgacctcaacgccaccgccgaagcccgtgtaaaaggtcttgtgggactgcgtgattgtgtgcaggaactgatcgaccttcagatggatgcatcggttccggacagcactattcgggagaagcagacggaactgaacagcctctatgacagcttttcttccaaatacggtctcatcaatgaccgtgcaaaccgtctggcctatgcagatgattcttcctattacctgctctgtgcgctggaagtcatcgacgaggacggaaagctggaacgtaaggcagatatgttcaccaagcggaccatcaagccccatcaggcggtggctgtggtggatacggcaagcgaagcactggcggtgtccatctcggaaaaagcctgcgtggatatggactatatgagccagcttaccggaaaaacaaaagaagcactggccggagaactgcaaggcgtgatcttccgcgtaccgggacagttggagcaggacggaacgcctcattatgtgactgctgatgaatacctctccggcaatgtacgccgcaaactgcgtcaggcgcagcgggccgcacagcaggacctttcttttgcagtcaatgtggaagctcttaccgccgcccagcccaaagacctggatgcgtcggagattgaggtgcgtctgggcgctacctggattgacaaggaatatatccagcaatttatgtatgagacctttaataccccgttttatctccagcgcagtattggggtcaactattcgtcctttactgctgaatggcagatcaaggggaaatcttctgtatcctacaacgatgtggcagcttataccacctatgggaccagtcgtgccaatgcctacaagattttagaggacagcctgaacctgcgggatgtccgcatctatgacaccatagaggacgcagacggaaaagagcgccgcgtgctgaacgccaaggagaccaccctggcggctcaaaaacagcaggcgatccgggaagcctttagggactggatctggagagacccggaacgccgccagactttggtgcgccagtacaacgaagaaatgaactctacccgtccccgtgagtatgatggcagtcatatcacttttggagggatgaacccggccattaccctgcgggaacaccagaaaagcgccatcgcccatgtgctgtatggaggaaataccctgttggcacatgaagtgggcgcaggtaaaacctttgagatggtggccgctgcgatggaagccaaacgcctgggcttgtgccagaaatctctctttgtggttcccaaccacctgactgagcagtgggcatcggagtttctgcgcctctatccttctgccaacatcttagtcacaaccaaaaaggactttgagacccataaccgcaagaagttctgcgcccgtattgcgaccggtgactatgacgccatcatcatgggacacagccagtttgagcgtatccccatcagccgggagcgccaggaaaggcttctctatgagcagatcgacgagatcaccgagggcatcgcagaggtgcaggccagcggcggcgagcgttttaccgtcaagcagctggagcgtaccagaaagtctctggaagccagactggaaaagctgcaagccgaggggcgaaaagacgatgtggtgacttttgagcagctgggtgtggaccggctgttcgtggacgaggcccacaactataaaaacctgtttctatacacaaaaatgcggaatgtggcgggtctctccaccagcgatgcccaaaagtccagcgatatgtttgccaagtgccgctatatggatgagatcaccggaaaccgtggcgtgatctttgccaccggcacaccggtcagcaactccatgaccgagctttacaccatgcagcgttatcttcagtatgaacgcctgcaagaactgaacatgacccacttcgactgttgggcttcccgatttggagagaccgtcacagcattggagctggcaccagaaggcaccggctaccgggcaagaacgagattcagcaagttctttaatctgccggagctgatgaacctgttcaaagaagtggccgacattaagactgccgatcagttaaatctccctaccccggaagtggagtaccacaacatcgtggcgcagcctaccgaacatcagcaggaaatggtcaaagctctttcggagcgtgcatcgctggtacacagcggaactgttgacccatcccaggataacatgctcaagattacctcggatggccgtaagctggggcttgaccagaggatcgtcaaccagatgctaccggatgaacccggaacaaaggtcaatcagtgcgtggacaacatcatgcagatctggcgggacggcaaagctgacaagctgacccagctggtgttctgcgacatttctaccccgcaggcaaaagctcctgtaagcaaggcggcgaaaacgctggataatccactgcttcacgcactggaaggcgctgtgcctctgccggagcaggaaccggtctttacggtatatgacgatattcgtcagaaactcattgcccaggggatgcctgccgaccagatcgcttttatccatgaagccaataccgaagtgcggaaaaaggagctgttctctaaagtctgtaccggtcaggttcgtgtccttttgggcagcaccgccaagatgggcgcaggcaccaatgtgcaggaccgtctggtggcgcttcatgacctggactgtccgtggagaccgggagaccttgcccagcgcaagggccgtatcgagcgccagggcaaccagaatcctcttgtccatgtgtaccgctatgtgacagaaggaacttttgacgcatacctctggcagacggtggagaacaagcagaaatttatcagccagatcatgaccagcaaaagcccggttcgctcctgcgatgatgtggatgaaacggcgctttcctttgccgagatcaaagccctgtgcgccggagatccccgcatcaaggagcgtatggatttggatgtggaggtatcccgcctgaaactgatgaaagccgaccaccagagcaagcaatatcgtctggaggaccagctgctcaaatacttcccggaggagattgaaaagcacaaaggttttatcaagggctttgaatccgatctggaggttttggcagctcacccgcacccagaggacggctttgccggtatggagattcgtggagacctgctgaccgataaggagaacgcaggtgcagctcttttggatgcctgcaaggaggtcaaaacctccgatccggtgcagatcggcagctaccgggggtatgccatgtccgtggaattttccgcttggaaacaggagtatacgctcctgctgaaaggacagatgacccaccgggcaacccttggtacagaccctcgcggaaatcttacccgtatcgacaatgccctcgcccagatgccccagcgtctggaggcggcaaaggcccagctggataacctctatcagcagcaggttgccgcaaaggaggaagtcggaaagccattcctttatgaagaagaactgagaagcaaaaacgcccgtctggtggagttggataccctgctcaacatcgacggaaaggggcaggcacacaccgagtctgttgttgccaaaagcacacggccttcggtgctggataacctaaaacgcccggtgcaaccccgcagtacagacaagaaaccaaaacagcatgaggaggtgcgataacatgaatactaacgatctgaatacagctctttatgagaaaatgtctgatgaacaggataaattccgggactggctgaaaagccagcccccggaggaaatcctgcaccacacctatgagtacacggtccgggaggacatcgtgatggcgatggagcagctggagctgaccgacgcacaggcacaggcgcttttggattccccctcgccgctggctgatgtgtaccgttattttgaaaagctggagaccggctacatggatgtgatccgggacagcattgaaaaccgtgccgacgatgtgtgcagagctaaagaggaactgcgaacaacaccggtctatccacattctgctgcctatgcgagagaacatggggagctggagcagtaccgagtttccaacaatgtaaatcgccaatgcaaagagtccattgaagcggcggtgcgggaacacttcgacggaatgtatctcagtcacgatgcggcaaagggtgtgatcgagacctatggcatggagcgtgtggcgctggtccttgccaacaccgtccagcttcaggactgggatgggcgttactcccgacgcaataaggaatgggccaagaccattcccaacgataaccccgaaactgtccgttgtggttatgtcctgaacagccaccctgctgtgctggatggttttattgatctggtgcgagaagaacagcagcgcagccgtactcagggagaaaaactgcaaccgtcccgtccctctgtacgggataagctcaagcaggaactgcctgcccataagcctgccgccccgaagaaacgggagccggaacgatgagcagccaaaagcgcaaacgggatgtgccggtcctgttttgggtatccgctgcggagatggaagcaatccagaagaaaatggcgcagtttgggacaaaaaacctgagcgcctatctgcggaaaatggctgtggacggctatgtggtgcagctggatttgccggaactgaaagaactggtatccctgctgcgccggagcagcaacaacttaaaccagctgacccgtaaggtgcatgagaccgggcggatttatgatgccgatttggaggatatatcccagcggcaggaacagttatgggacggcattaaggagatactgacccggctctccaaactttcgtaaccgggacaaatacctcatctgcggagggaggaacggcgttcttttcgccgcgccttcctccgctttttctttttgcccgtatccttgtcttttggctatgagacagggataatggaatcaggaacaggaactgtgattttgagaggaggcataacaatgagggcattggtatttttgttgaaactgctgttgaagattttagcggctcccgtaattctggcgttgacattgtttgtatggatttgtgtggggatcgtctatatctccggtctggtgctggggcttatcagcatggtgatcgccctgttgggcgtggcggtcctgctgtcctgttccctgcaaaacggtattatcctgctggtgatggcatttcttattagtccctatggtctgccgatggctgccatctggctgctgggcaaggtgcaggacttgaagtttgccattcaggatttggtttatggataaaatgcgcggtcacaaaaatgccagacagtgtctgttaaatcgctatatttacttccgtgctacattcgtgtataatggtagtacgaaaggaagtgatgaatgtgaccaaatcagaacggtttgagcagttagacagacttctgaccgagcatgatgggatgctgcaaaccgcacaggtaatcgccagcggaattgtaaaacccattttttatgaatatgtcaaagagaaaaatcttcagcaggttgctcacggaatttatgtctccgaggatacctggcttgatgcgatgtttctgttacatctgcggtgtggtcaggcagtattttcccatgaatcagcgctatttttccatgacctgacagaccgggaaccatctccatacgctatcacggtgcgcagagggtacagcaccactcgcttaaaggcagagggcctttctgtttacaccatcaaaccagaactatatgaggtagggctgacaactggccaaacaccttttgggcatacggttcctgtctatgatatggagcgcaccatctgcgatctgctccgcagccggaacagcatggaaatacagacgtttcaaggtgcgctgaagatgtatgccagaggaaaggacaaggatctgcggactttgatgcggtatgccggtatgttccgggttgaaaaaattttacggcagtatttggaggtgcttttatgataaaaacagcaaggcagctaaaagatttaattcgcaatctttccagagaaaaatctgcggatgcacagcttttaatgcgaaactatatgatggagcgttttctggagagaatttccctttctgaatatcgtgacaaatttattctgaaaggcgggatgctggtagcggcaatggttggactggatgcccgttccaccatggacttggacgctactgtaaaaggagccaatgttaatgtagaggacatcgagaacctgatttctgctattgtgagtgtaccgattgatgatggcgtcaaatttcagctgaaaagcatttcagagattatggatgaagcggagtatcctgggattcgggtcagcatgactacaacctttgacggtgtggtgacacctttgaagattgacatttccacaggggatgccattacccccagggaggtacgctactctttcaagctgatgctggaagatcgctccattgatatttgggcatacaatctggaaaccgttctggctgaaaagctggaaacaatcatcaccagaaccaccacaaacacccgcatgagagatttctatgacatttatattctggaacagttgcatgggaacacattgaacccacagattctccatgatgcgctgtgggccacttctcacaaacgcgggacagaacgacatcttgcagaagctgccgaagtttttgaggaagtggaaaacagctcggttatgcagaaactttgggaatcttaccgcaggaagttttcctatgcggcagatctggagtggagcatcatcatgggggcggttcgcagcttatacgctctatgtgaaaagggatcgagcctatgaaaaaacacggtcattattgcaaagtctgcggagaatacaaagccaacgaaaaattttccggcaaaggccatgcggctcatatctgtaaatcctgtgcttctttgccgccggagaagcaagcggagcaaatgacaataaaccgcttgctaaatctcccctggcgattatcaaaggaacaaatttcctggctgaaaaaccgaatgaaagataagcgcccggaagtccgtgcgctggcgaaagaacaatacgagatgaggtttcctccaaaacagttagaggacaccgatgacgattttgattttcttgatgagaatgattttatagaataacgaaagcggtctgcaccatgcaggccgtttcttttttggaaaggaggctccatctatggcaaccacacgaatcatgccgctgcatatcggcaagggccgcaccgaaagtcaagcaatcagcgacattattgattatgtggcaaatccacaaaagaccgacaacggaaaactaattaccggctatggctgtgacagccggaccgccgatgcagagtttctgctggcaaagcggcagtacatcgccgccaccgggcgggtgcgcggaacggatgatgtgatcgcttaccatgtgcgccagtcgttcaaacccggtgagattaccccggaggaagccaaccgcctgggcgtggagtttgccaagaggtttaccaagggcaatcacgcctttgtggtctgcactcacatagacaaatcgcacgttcataatcacatcatctggtcggcggtcaatacggattgtgaccgaaaattccgcaacttttggggcagcaccagggctgtccggcgcttgagcgacaccatttgcattgagaacggactgtccattgtggaggacccgaaaccccacggaaaaagctacaacaagtggctgggcgaacaggccaagccatcccatcgggagcagctgcgggtgatgattgaccgtgcgctggaacagaaaccggcagactttgatgcgctgctgaagctgctttcggaaatgggctgcgaagtatcccggcgcgggaaagccatccggctcaaagcacccggctggaagaatgtagcccgcatggatgacaagctgggagccgggtacagtgaagcggaaattcgtgcggtgctggccggtgaaaaacagcacatcccccgtaagaaatccatcgtgcagccggagcagcccaaggtcaatctgctggtggacattcaggcaaaattacaggctgggaaaggcgctgggtatgcgcgctgggccaaggtttttaacctgaaacagatggcgcagactgtaaattttcttaccgaacatcagctgctggactatgcggagctggcagaaaaagcggcggcagccaccgcccaccacaacgaactgtcggcgcagatcaaggcagcggaaaagcgcatggcggagattgccgtactgcgtacccatatcaccaactatgccaagacccgcgagacctatgtggcctaccggaaagctggttactccaagaaattccgcgaggaacatgaagaagaaatcctgctccatcaggcagccaaaaatgcctttgacgagatgggcgtgaagaagctgcccaaggttaaagacctgcaagccgagtatgccaagctgctggaagaaaagaagaaaacctatgccgagtaccggcgttcccgtgaggaaatgcgggaacttctgaccgccaaggccaatgtggaccggctgctgaaaatggacgaggaacagaaaaaggaacaggaaaaagaccacggccagcggtgagccggtcatggtccaaagcgttcgcagaacgcgcagccgcagaatgaaattctgtgtccaaaggggtttgggggcgctgccctcaacaagcaaagcggaggggaaaatcacggcaggattttgccctctgcgggccgagtgtattaacaccggcattgcttgcctcttttatcaccccctgtatcaggaattcttgataaccgcttttatctgtacctgttaggattagccgatgagcacattgcgagtgtcggaataaagaactatttttcaaaggttgatttatgcttgattttacagatagtccgacaaaaatatttgacatcatcttttgtccattctatacttaaatatagttagatgtagcaaaccgacaggaggtgtgagaaatgcactcttatgaaaaacaagcactctctggtgcgattgagatattatcacagtcggaattgccagatagatttgagggcatgaagctatatggtttctcagaagaagctaaagatgaattgcgccaggactgcaaaattttccgactatcaaatgaaacaggacacggaaagattaccgtctatcaggtttttccaggtattgagctttactataacgatatgcacatggggtattgcaaccaaaaccaagctaccgcaaaaaatatgatagagattaaccactgtctgattggacgttttgagtgtagctttggtgaaaacagttgttgctacatggctgaaggtgatttatccatcagttctgggatgaagaaaaaatcaaattcgtgtttccctctgaaccattatcatggtatttccattatcatcaatctggatgagctactgccagaggtgcggcggattatggaactgctgaatattgatttgaagtatattcaaacatatatctgtgagggcaaccgttgctgtatcatgcgagccaatccgtcgattgagcatattttttcagaactttaccatgtccgagaaaaacgaaaaccgggatatatgaaaattaaaatgctggaactgcttttgtttttaagcgatcttaatacggcagacgaagttttgcagatggattatttcaatcgaaatcaggttgcattgattaaagaagtggcgtcctatattacggaggatttaacgacacatcacacaattgaacagctttctcagaaatttgagatttctacaacagcgctgaaaaagtgctttcggggcgtatatggaacctctgtttattcctatcttcgtacctatcggcttcaagtagctcaaaaactactactggaaacagagttgtcagtgacggacattgcaagcaaaatcggatatgaaaatccgaacaaatttacttctgccttcaaggaaacgtatggaagttctccaacggaatttagaaagagtgtccgtttggataggaatgggtctgtatggagtggcgaagaaatctgagttgcattaaaatatcctttgtcagataaaagcagaaagagcgcttgaggctggcctattttttgaatagccagttagatggtgctaactctctgcaagacaaaggaggatttccaaatggaaaatgaaaaatcgacaggcaacaagtacactgtcaaagacgcggcaatcatcggtatcttctgtgcggtcatgttcgttgtatttatggtctattcgaccctgactggcgcttctctgttctattccatgatttttaacgccgccggtgcggcacttatcctcgcaccgttctatgtttacatgtgcatgaaagttggcaagcatggccccgcccttgtctacaatatcatgtgggcgattatcgccggactcatgatggggccgtttatgatcccgtggtttctgggtggtggcatcattgcggagctctctatgtgcggaaagggtgcctaccatgacattaagcgcgtgtctatttcgtgggtaatcacagcattagttcgtgctgcacacgggatgtccgaaatctggttcttcaaggacgcattcctcgccaccggcgtcagtgagcagcaggttcaggttcagacccagtattacactgatccgaagtatgttattctgagcctggccgttaccgcagtcctggccatccttggctgcatgattagcaacaaactgattgtgaagcacttcagaaagagtggcgcgattaaataaactatgaacatgaaatttgattttcggaccaaattgcttgtcatagttctcactatgtcgcttgtggcggtgctcacaagcgacattttgatatacacacttttgggtgtcttgagtgtgtatctgattattcagggctttggcaggcagacaataaaatatctgatcgtctgcggcatttttatcgtgttgaggctgctttccggggggcagggcattaccgtccttatgccggaaatgttcctgtttatggtgcttcgtattttgatgatggttatggctgcacagcctgtgatcggtatgcctccaggagaagttgtggcagtttttaagaaaatccacgctccagacggaattgcgcttcccgtaacctttatgctgcgcttctttcctacagtacgcagtgagttttctgatgtgtttgcctcacttcggctgcgaaagctattgtcatggaaacaccctttggacgcaatggagtatattgttacacctgttattttccgttcatccagaatagccgaagaacttgctgcttctgctgaaagcagggggatttccaatccagggaaacatacttgccgcagaaagatagaatttcaaaagcgggattggattatgtgcgcgattgctgtttgtgtaaccgcactctattttgtgctggaaaggacggtagcataatggtaaatgatgaagcaaagcaatccgttatccagtttgaagatgtatcttttgaatatccgggagctgaaacagagagtattcagcatatcaacctcgacgtaaaagagggagaattccttgtcttgactggaggaagtggctgcggaaagacaactctgacacgattgataaacgggttagctgaacaattttatgaaggaacactgaaagggcgcgtcaccctgttgggacgtagcatatcggaatatcctctgtatgaaatcgggaaaaaagtaggctcaatctttcaagaccccaaaagccagttttttgccagtattacagaggatgaaattgcgttcgggtgtgaaaattatggcgtttcctatgaagaactggatgggcgggtttccaatgcaattaagcgtattaacggagatatgctgcgtgggaaagagatttatcccatgtccagcggagaaaaacagaaaatagcggtggcctccgtcaatgctgttgatccagaaatttatgtatttgatgaaccttcggccaatctggatatgtattccgttgaggcacttaaaaatcttatgcgcgaattgaaggcggagggacataccatcgttgttgctgaacacaggctttattatcttacagaccttgcagatcgcttcctctacatggaaaatggaagcataaaagaagaatggagtcctgaagaactgctttccatgtcagaaaataaacggcagaaaattggaatccgggccgcggatttgcgccatatcgaggtagatattcctcccagagaagataaaaatgtgacattagaggtaaagcagctggccttttcttaccgcaaacatccagtctttcacgacatatctttccaggtgtatgctggtgatctgattgcgatcgtaggacataatggaattgggaaaacgacgttgtctaacattctttgcgggatacagaaagaaaagacagggcaggttttatacaatgggcaagaaatttccaagggtaaaagaaagaattttgcctatttcgttatgcagaatacggattgccagctgtttggagacagtgtggaggaagaattgctcttgaacggtaaaggaagtacccaggagcaaagggatgatctgctgaaattatatggactttttgaatggaaagacaagcatcctgctaccctgtctggaggtcagaaacaacggcttactcttgccgtatcagattggatagatacgcctgttttgcttttggacgaacctaccagcggccttgatttcaaaaatatgatgagaatatctgagcatttgaaggctctggctcaaaagggaaagaccattttgattatcacccatgattatgaatttgctgctatgacttgtaatcgagtgcttcattttgttgatgaaggtcatgcagaaacattccccctgcaaggaaacctccctcggttatattcttgcctcatgtgtcagtagttgtgtgtctgaatggatagatatgccctgtatggagtggcaaaaaccataaaatacttttatgataataggcgggttagaagattctaacccgcctattactgcgaaaggagccttgcttatggagaagcaaaaaaatggagagctgtccagaatgttcggatatgcaggaaactaccatgtcctgactgttttaggctgtatcctctccgggattagtaccattttgtctatgctgccctttgtttgtatatggcttgttatccgtgatttgattcaggcattcgctgcgggggatatatctcttgcaacggaaagtactcgttatgcgtggatggcagtcgtgtttgcagcagcaagtattttaatttatttcatcgcgttgaactgcacccacctggcggcattccgcacagcaaccaatatgcggaaaacagcaattcatcatattgtgacacttccgctgggatatttcagccagaacgccagtggacggctgcgaaaaatcattgatgacaacgcaggacttacagaaggattcctggctcatcaactgccggatttgactggtgcggttgttatgccggttgctgttattgtgttgatttttctttttgactggcggttaggaatctgctgcctgatccctatggggatcagtgtcatctttctgaaacagatgatgggtggagacaatgcacagtttatgggtaaatacatgactgcactggaaactatgaataaagaggccgtggaatacattcgcggtattcctgtagtaaaggtgtttcagcagacaatttactccttcaaaaatttccatgcagccatagaagaatatgaaaaatttgcttccgggtatgctttgaaatgccgtattcctcttaccggatttacagtcacactgaacggcacatttgttttacttatcccggtcgctatgttgattttatctggagtcagcggacaggccgcttatgaaaatgttgtactggatttcctgttttacagtctgtttactccggtctgtgcaactatgatgaaccgtatcatgtttgccagtgagcagctcatggccgcaaaaagcgcagtcagccgagtggaggaaattttacaggaacagccattaaaggaaccggagcatcccatgatcccggcagacgcttcgattgtattttcggatgtgtcttttgcctatccgggtgccaaaggaaacgccttaaaccatatcagctttgaggtcccggcaggaaaaacagttgcacttgtcggagcttccggcagcggcaaaagtacggcggcaagtctcattccccgcttttatgatgtccaatcaggctccgttacgattggcggtgtggacgtacgcaatattgaaaagcaggaattgatgaaaagagttgctttcgtgtttcagaatacccgcctgttcaaagatactttacttaacaacattaaggcggcccgtccagacgccaccagagaagaagtgttgaaagcggccaatgaagcacagtgcaaagatattattgaccggcttccggacgggcttgatacgcttgtcggaacaggaggcacttatctctcaggaggtgaaaaccagaggattgcgttggcaagggcaatcttaaaagatgctcccatcatcgttctcgatgaagccacagcatttgcagacgccgagaacgaacatcagatacaacttgcctttgagcggttgaccaagaataaaactgttttgatgatagctcaccggctttctacaatacaagacgcagaccttattctggtatttaaggatggacaaattgctgaaagaggtacacatgaagaattagtcgctttgaatggcatttattcttctatgtggaaggattatcaaacttcgattgcatggaaagtcggaaaggagggtgagcagcatgattaaagcactgaaaaacaagtatgcgttaagcaatcagggtgcaaaggatctgctgaaaggaattatttattccgtactggcaaatatcagtctgatgtttcctgttattcttctggcaatcgttctcaaccagcttcttgcgcctattttgggaatgaatgcgccggagatcagcgccattgtttatacagtgattggtattgtgattttagccgttgtttttatctttcactattgccagtacaccgcagcatatctgggaacttatgatgaaagtgcaaggcggcgtatcagtcttgcggaaaaattacgaacccttccactgacctttttccaccagcgtgatattgctgatctgacaagcacaattatgggggactgtgcaaattttgaacacgcattttcccataccgttccgcaattttttggagcggttatctcaacaggtattgtttgtgtgggcctgctgattttcaactggcaaatgggcctggcccttctctgggtagctccgatttcctttgcgattgtacttctgtcacggaaatggcaggaaaagctaagcaaaaagcatatgaatgccagactggaacttgccgaaggcatccaggaatgcctggagaccgtacaggatataaaagcctgcaatcaagaggaagattatctccgcaaactggatgcaaagatggatgctgccgaaaaagcacagatttcttctgaaatgacgacagcgagcttactgacaaccggccagatgtttttacggcttgggttggcgacagtaatcgttgtcggaaatagtcttgtggtaaacggcaatgcgaccctttttacctatattctgtttttgattgcggcttctcgcttgtacgatcccctttctggggcaatggcaaatatggcagaactgttttccgtacaacttcaagtgaaccgtctaaaagaaattgaagaatacccggaagaaaccggcgaaaaagaaatccatacaaacggatacgatattactttcgatcatgtccggttttcttatgagaaggacaagccggtgctgcgggatgtctcatttactgcaaagcagggacaggttaccgcattggtcggcccgtctggtggcggtaaaagtacggttgcaaagctggctgccaaattttatcccctggatggaggaagaatccttttgggcggaaccgatatcgctccgctcaattcaaccatgctgatgaaaaatttctctatcgtttttcaggatgtcgtacttttcaataacaccatcatggagaacatccgtgttggtaaaaaagacgctacggatgaggaagtcattgccgcagcaaaggcggctcagtgtgatgaattcatttcaaaattgccggatggctatcagacggtgattggagaaaacggttctacattgtctggtggagaatgccagcgtctttctattgcccgcgctcttttgaaagacgcccctgtgattctcttggatgaagcaaccgcttctcttgatgtagacaacgaaactgaaattcagaacgcaatttccagactggtcaaaggtaagactgtccttattattgcccatagaatgaggacggttgaagctgcggataacatcgttgtgttgtcggatggcatggtagttgaaaacggaactcacgagaaacttatgaaagaaaatggactgtaccgtaaactggtcgatttgcagacagcctctgcaaattggagattaagcgtctaactcataataaggaggtactgatgaaacttcatgcgtccggcgaagattacttggaggccatccttgtcctccataagaagatgggcatggtacgctccgtggatgttgccaggcacatggaggttacaaaaccaagcgtgtgccatgctgtaaacaccctaaaagacggcggctttctgacgatggatgaagatcactttctttatctgaccgatataggccgggaggttgccgaaaaaatctacgagcggcactgctttttccgagacaggctcatcgccgcaggcgttgacccaaagacggcggaaactgatgcctgccggatggaacacaacatcagtatggaatcctttgaaaaacttcgggattactattcctctcaaaagggaaaatagctggcctgtacagcaacggacaaagcaatgcggccgggtaatacacccgaccgcattatttgttagcgttattttctttggtatccaacattttatcaatcagggcaagcaacagctcctgatcccgctggctgcattgtggaaccaaccgtctgatccggtcaacaatttcgctgtctgtgttcgtctgcggcgcaaggatttcatcaaaagaagcgccaatggcattgacaaggcgaatcaaaacatccaggctcggcttgcgcctgccgctttctatggccgctaaaaaacgaggactgatttctgcacgctccgcaatctgttctctcttatagtttcgtttttctctggcattccgcaaggatgtcccaaacgaaaaatctatatgtcgtacttttttatccactctccgtcacctcacataataatattttacgagttacaaatattatgcggaatgattgcagagtggcttttttatagctactatgcgttgccttttttgcttaggaggagatgataatgcaaaaagacaatggcctgcctgctcgtggcaggtcctcttaacgaaaaaaatctggccgtgaaattgcgccagaatccgaaaaaaacagtttcttccctgccggttttttatggcctgcacaggaactatcagtagcagaaaaagagcaacaagataaaacggacactgacatgggatattcccatgcctgtgtccgttttgtttttcttgtatttccacgatgccgttcgccgccttccgagagtttgaaaaccacccacttttcaaactcttggaggtaacggctatgagtaaaaatcgtgaagaaagtacgaattattatctttacatagatggacaggctgtgccggtaagcgaacaggtttaccgcgtgtatcagcactacgagcgaaaagaagaatacttttcctatgatctgaaaacagaaaagttccagaaagacactgcaattttcctgcccagcagagaggattcctatgagcgcctgctggaaaaggacaagcagtttgccgcttctggtcagcctgtggaggaacaggcggtctcgtccgtttggttggaggaattattacaacatctgtcatcggatgagaggatcattctccacaaactgtatttcgaggacaagtcagaacggattgtcagcatggagcttggaatttccaaaacagctctgcatcagcgtaaagtcaagctgctccaaaaattaaaaaattttttggaaaacatgggaaaagcatagaccaaaaccactctcccaacggggaaataagtgagagggtctatctctctcatgcagcttgacaactgaatacacggcagaacaggtacataacccgcgcatgagcgagtgcaggacgccgcgaagatggagcagccaggaggtgatggacaagctgtttcggagcgatcgacgtctctgtgacccggatggtggcacatccggcgcgatgagggcgcgggggcttaaagatacttcctcacggcccgccaaagacttggggggaaccctgcggcacacgatacgaacgatgctgcggagttatgacagccgcgccagcggagacctgttgtgttcccatcgtcagggggcgtggcaaatatgacgagtaatccgaacagaataacagtagccgcaccaggtttttatccgaagatttctttcagactggtgcggctatttaagtattaagatattaaggaggcgagagtgatgtttgaaaaattccatcgaggtgacatatattcggctgatttaagccctggtatcggctctgaacaaagtggctctcgtcctgtactcattcttcaaaataatgtgggaaattgtttcagtcctacgattattattgcagcaattaccagtgtaagcaaaaaaaacagaaagttccccacgcattaccacttaaatgacagatgcggtttggtgaaaccatctgttgttatgctggaacagatcagaacaatcgacaagtcgaggttaaaaaactatattggtcatctaaacaaggatgacatggaaaacataaacaagacgctcttgtgcagtctggggattacataaaagtgccgaaaggccgtatcattttcaggctgtgcaagtagagttataatttcgttaggaattgcggaggtgattctgaatggagaatatccagaataaaagcgcattgattccttcagatgaaatccggtcagaagaacttctggcggaacaaaaatttgaagcgtttatcacttcactggcacatatcatcgagaaatatggtatgagagtgctgggcgaggttgacggagctgcgtgagaatcgcagctttacataggatattttccaaaagtaaattttggaggtatgaattatgaaccgatatggaaaacgctgtgttttgtatccgagggtcagcacagagatgcaagtggacggatacagcctggaaggtcaaaaaaatatgctgacacgatttgcggatcgtgaggaaatgatcattgttgatacttatgaagatgccggtaaatccggtaaatctattgagggacggcctgcctttcaaaaaatgctcagagatattgaggatggcttggacattgactatattttagtgtataagctgtcacggtttggccgtaatgcagcagatatacttaactctttggagttggttcaatcttatggtgtaaatctgatttgcatagaagaagggattgattcctctcagacaagcggaaaacttttgatttctgtactatctgctgtggctgagattgagcgtgagaatattatcgagcagacgatgaacgggcggcgcgaaaaggcacggcaaggtggatggaatggtggctttgctccctacgggtatacactggaagataacaagctgatgattgaagaaacagaggctgtggcaatacggaagatttttgaattatatacttcatcggaaatcggtttgggtggtattgcgaatcagttgaacttacaaggcatacggaaaattccgaggcagaatggcacattagaggattggacaggacattttattaaactgatattggataacccggtttattgcggtaaaattgcctatggacggagaacgaaggaaaaagtcaaaggcacaaaaaacgattaccagatgaaaagaaatgacgattacattctgacagagggacagcataaaggaatcgttagtgaggaggtatgggaaaaggctcatgccaagcgtcttagaaccggagtaaagcaaccgtcaaaaattgggcgggatcgagttcatttgttatcaggtctgctgaaatgcccggtttgtggaagtcccatgtatacgaataaacacgcatggacaaataaagatggcacttacaaagaaatttactattatgtatgtagtcggaataggatggtcaggggtaagcattgtgaatataaggcaatgctgaaaaagaccgatattgaaccgatggtcattgaggcaattcgtgagatcgtaaggaatgaggaatatgcccaggccattaaaaaacggattggcgttcagattgacacgaaagcagtggataaagaactggagggctatcaggcaaagctgaaggaagttgatctgaataaaacaagattggaacgggaaattgacagtctccctgctgatgcaaaataccgggaacgaaagctccatgatatgaccttgcggttagattccctatatgatgtcattgttgagctggaggaaaaaatcgaagatgccagacttcggcgagatgcaattaagcaacaggcaattactcttgagaatatttacaaaatcatggtgaatttcgactgcgtttataatataataaatgacgaagaaaagagaaatgtggtcacagccttgattaaggaaattgaaatttacaggaatgacgagtctgaatatccgctaaagcggattggcctgaattttccggtgttcaaggatggcggggaagttacggaacttttgtgggacaaagggaataccgttgagactgtaattttgttgtcccgaaaaactctagatgcagtaatcaacataaatttagatatgtctgaactggatcttacaagtgcagaaagtaaagcaacatatgcagaaattaaaaaatatgtacttgataagtttggtttgaaagtatcacagttttatattgcacaggtaaaacgtgaatttggtttgatagaaagaattaattataatgtgggcgaaggtaagaaccatgtaccgcaggtaacaccagaaaagcgtgaagcgattattgatgctttaaaacatttccagatgatagaataaaaaagctatacaacaaaaattgacttgctttcgggcaggtctttttttatgcaaaaattcatagggggaagtaccgcacaggtaaatcaaaaattgatttttacaaaaaggtgcaattcgaagcattgaaagaaaaagtagcaaaaagaaagagtgggaggttatgcttacgcataacctatccatgatactctttaataccaactaaaataaatctattagttaattattacagtaacatcaattctatttgtttatataacagtaaagataaatctattagtatctattcacttaagatcatgctcaattactctacaaaagacggatgcaagcaatcggcaaaatgccgatctcgaaaactcaaatgaaggggtgcaggttttcccacacttgtttttacctctctacagtgtttgtgcggctttactaatgaatttatttagtgaaacacaatctggtttagtgcgtgtgtgaaaactattcatttgggagtgcaaagcgttttctattcatttcttacccgttaaggaaaacatttcatttattatttttcttcaataagtctataattttggaactgtcaagataacctacaagatttatttttgtacttggttctataggtttactgaatgagacaacaagatttatttgcctaatttttatacttattatactttagcttattatcacgatcctgcaaagccttataaaatctggttttgaagtatgtgttttcggacagtttccgcaagtttattacggacaacttccgcatatttcgactaatacaaaaaatttttttcttttttgtcggtatcgggcatattgattatataacaaaaaaagaaaggatgataaaaatgaataaaaaagcctatgagatttgtagcaaggcaaaggtttcaaatgattttgcaaggcatgaagtaccattagtacagctaacagatatacaaaaagatattgaaaagatggaaagatataagaaatctttaatttatgaatatgtgacgggaaaaaaacgtgtgaaaggagtagaataatgccaaagaatgtgattaaggaaaaagaagattttcaaagatatattcttgattatttgaaaaataaaaatggctatgttgtgcgtgatgcaaaaacttgttttaatagccattatgcaatggatattgaattgctttttcagtttctaaatgatacacaggctgacacaatggaaaagcttgaaaagatttataaagataaaacaaaggaaactattataaattatctcaataaggaaattacaaagcttgatacacatacaaagacaccaagcatccgacagacggcggagaaagaggaagtaataaaggatgcgttgaagcattttggaataatttaaatagtatatcggatatcattttatagccgtttgttcagtttggagtaggtgctatttgattatctggatttttagaactatcgaaaaagcagaataggttgtataatatatatggcaaagtgaaaatgtgtaaagaagttatcttgatattatagaggagaatggaaaagtaaatatgggattttctaaaaatgattttgaaaaagtagatttgcggataaaaaaaataacagaacagactgttgagcaaatagaagtagattcagaattacctccaacaatagagcaattagaagataataataaaacctactccattatggcagctatactatttatcgatattcgtaagtcaacatacttaacggaaaatagccaagcaaaaagtatggttaaaatatatcgctcatttatgcgaatggcggttgattgtgttagaaaaaatggaggagttacaagacaatttctgggtgacagaattatgggcgtctttattgactccattgatgaaaacgggagtatggtggatagtgcagcagataaagcaatcaatgcggcaagaagtctacagactgtgattgattatagcctaaataaatatttgaaaactaatgttaatggaaaagttattgaatgtggtattggaattgattatgggaaggttcttgtaactcaggtcggtatgtatggactggaaagcgatgagaatagagagaacgaagtggattgcgtatgggttggaaatacaacaaattatgcaagcaaatattcagatatagcatctggcggagaaatatttatttcggataatgttttcaagcaaatgtcagatgagtacagggaagtttttgttaaatcagcaaaatataaaggaacaaagttatttcaaggctatgtgacaaaggattattatttggagttttcagaggatttaggaaaaccaatcaagatagaagaagatacaacagtagagtcggatacatttgaaggattagcagatggcattagagaaatcgagagattgcaagataaacttatacaaagagaaaagcagcttgctgttttggaggataaactaaaaaaagaaaatcaggattacagagataaatataaaaatgaaaatacagcaaaattaagggcttttgatgaaagaaatattgcggaagaagaattgcaaaaaatacgaaaagattattatatagacattaagaatattctttccaaagtacattaccatgaatatcagtatatggataaaataggaaaaaaagatttgttttcaatgatagaaaaggcatatgaattgggggcactaatcggaaaaaattcgaaagaagtgtcattagaattaagttgttatttaataggaatttatgattactttcaagaatattccaaatcgtttgatgtgatgcttgttatggcggaattgtcagattattgggtagacctagaaagtgcaacgctaaaatgggcaaataaagaaaaggtcttatataaactttataatgaaattgaaagagcattggtaaattatagagtaaagtatgaaagaagaaaagattttgaaggctatttacaaataataaagaaaattagggggtattaactatggaacacgatagaaaacaaataaaagaaaatagagcatttaaaaaagaagatgcttatgaaacgttaggtattataaatacatggataggaaatatggatacaaaagtttcctttgcattagcattagcaggagttttaataggtgttatttttgaaaagggcatacctaatgcatttgaaagaataactgaggtatcaaaacttgcagaattatctggcggagaaattatagcagccattttggttgcgctgctatatttatcaagctttatttctattttatgttttatgctatctattattgcaagagtgaaaaatcttaataatgcatcgtctgcttttttctttggctctattggaaatatgacattagagaattataagaatgccgtaaaagatatggatgaaaaagaaatagtagacgatttagaagaacagatacatacaaattccaaaatatgtagtttaaaagcaaaatggtataacaaagggataaaatttttattagtgacagttattctgtggtttgtatgtatgatatttcagttgatatagaaggagaaaaattatggaatcaaatcatacaatgtcttatgacgtagataaaagttcagacagaatggatgatattttaaatgcaagtgataatgattactgtgataaagacagcattcctgcgagaagtgatttgacatttaaaaatggttattatgtaaatgttactgcaatttttattgacattgtagggtcatctgatatgacagatgagcataaaagaccaacattggcaaaaatgtatagagcctttttgtcagagtgtgttgctattatgaatgcagaaattgattgtaaagaaataaatattaatggggattgtgtatggggagtttttgataccccttataaatctgatattgacaatgttatctcggtggcagcaagactaaatagtatgattaaaatacttaattataaattaagaaagaaaaattattcagaaatttcagttgggataggtatcgattatggtagagcgctgatggttaaagctggatattcaggtagtggaattaatgatgttatctggatgggggatgttgtaaattcagcgtgccatttatgtaataaagcaggtagagattatagaaaagtaattgtaatttcagacgttgtttataataatttaaatgagcataaacaaggtttattttcaagctattctgatggatgggtgactaggtatgaaggagatattataaataccagcatgaatgattggtataatgagcattgtaaatgaaaagcctaatcccccagctatgctggggagaatggaatagttggaaacggtgaggataaaaaagaaaaacctcctgtggtatattagacacggaatcagatgcagtcatccggctggaagaaatacacacatttttctccaacgaatgtttcatatgcagttccagccgaaatctgtatcaagtgcttcctgtaatataacttatcactcaaagctgcttacctgcttcgtgcggcaacttctttcagatggctccgtcccgcgttctatacacatgcaaatgccgcggattcttccttgaggttctttgccacagtactgttctcctccatctgtccgtttacagtggacatggactgtaccaggaaatcaatgttcgtggctgcatcagtcacgccgtttgcggattcttcgaccgcacggctgatgccctcaattgcctctgtcatctccatcattgtcgccagtatatcctgcgcctcgctcgcatactctgccatcgtgttgtcgatgtgggtcgcatcatcattgtactgctgacctccctgcacaaatgcacggtaatccggcagaatgttctcgttgatataaccaacaatcttctccgaagaaacaaccagcccctgtactgcctcaattacctgctcattgatcgtctggatattgttcgctgtctcacgcgaagaatctgcgagctgtctgatctcatctgcaacaactgcaaatccctttccggcttcaccggcacgcgctgcctcaatcgatgcattcagcgcaagcaggtttgtctggctggagatactcagaatatccgccgtcagttgtgcaaccttctccacactcttagaattctcaagagcctgattcatctccgttgtaatctcgccgatcatctcattggtactgttcatgttctcagtcgccgtgtgctccagctccgtcgcacgcttcttcatatcctgcgcatactgtgacataaccttggtctgatctgccatcttctgtactttgccttccgcagcggtcgtattctcgctgacgctgttcgtcgttgcggatacctcctccatcgtcgcagaaagttcttccatgatcgcggaaatatcattggcattgtcactggacgctgcaacactgcttgccacatttccgacaactccgtcaaggacattggaattgctgatgatgttggacatgatattctgcagcgtttcgatgaaatggttgataccgatcgatgactgtccgatctcatccatcgactttaccgtaacgcgctttgtgaggtcaccgtgtccacctttgatctcatcaataatctctgtcagttcactcgtctgctttctgagcggctttacaaccgtcttgataatcacaacaaccaccatgacaaatgccacaaaagaaattgccagcaggatcagcgatagtatcatattctggttgtacagatctttctgttcctgaatattctgcttcaccaattcatcgttgcgagatatgagcgtatccatattgaccgcaatcgtatctgaccactccgtcatcacagaatttgcctttgccaccgctgctgcagaatcaccggccatcgccgtctgcatcagttccacggttgtcccctgcgcctctgtgagcagatcaaatgtctcattcataagctggatatcatctgccgtaaaatagtgatccatcgccagaagctccttttcatagctgtccacgttcgactggtattccgtcagctgggatgccacatactcatacagatccttgctcggctctgcgcagagcgcaagcgtaagcttctgcgtgttggcaaaagcaagattgatctcatccatacagattgtcgcacgtacaccctctccggagatctgattgctttccttctgaacggcggtcatggaataaagactcacgcctgcaatcataatcgcgatgcacccaagaaccgcaaccggtataatgagtttggcaataaccgatgattttttcttcatcctttcgtatcctccattaaaattgtctatagccccattttatcatgatatgcggacatattctattcatttttttaacgaaatctatacattaaaaaaaatcctcgtatatcttgacattcaagttagttcgtactaacataacagttgttatggaagaagaccgaaaaaaattaaccgaaaagaaattactttcctgcgggaaacgggaatttctggaaaagggatatgcgaaggcgaacctccgctcgatctgcgaagcttccggcgtgacaaccggcgccttttacttttcttttgcgaacaaggaagcgctgcttcgcgccatcttagatcccttcatcgcagattccagagagctcctttccgggcttgcccggatggaggaggaacatcccgagactgcagacgacaatgagatccagatcatccggtatctctccgcacaccgtgaggaatgtattatcctgatggagaaatccgccggcagctgctatgaacattttcatgaggaagcagccgcgatgatgcaggaatctttccgccgttattacagaaagtatctcggcgccgaaccggatccggaactgatccggattcttgcgtccatgcgcctgcacgggtatctggaattagttcatggagactacacaatgaaagaaagactgtttttagccagagcgatcggcatccacgccgacgccggcaccctgagtttaatacaatatttaaaggaagagaatgatgctcaccgttaatccggtgggcattttcttttataaaacataacaaaaaaaatatttgttatcgaggaggaaaacacaatgaatcaaaaaccaaactacggaaactgggtacctgaaaaactcttgtatctgaccttcggcggcgccgctctctttctggtgcttgcactgctgtcaggtcttgctttctcaaacacgcccctcgcggtcatctgcgccattctctgcgccgttctgctcgccttcggcatctatatgtatgcgtgccacgaatgctttgcctttggaaaaggcgatatgatggcaaaggttcacgcacatctggtcgcccatctcaactgggacggacacggcacgcttctcgacatcggctgcggcgctgccccgctcaccatccgctgtgccaaggcattcccggacgcagcgctcaccggcatggattactggggcgcgcagtggaactacgccaaagagcagtgcgaaaaaaatgcggcaatcgagggcgtcgcttcccgcatccattttgagaaaggcgatgcggcacacctgaactatgccgacgagacgtttgacgccgccgtcagcaacttcgtcttccatgaagtccactccgccagagacaagcgtgatgtcgtgcgggagtcactgcgcgtcgtaaaacgcggcggagctttttctttccaggatctcttcgcccagaaaagcctctacggcgacatggatgcctttgtggaagagctgaaaaaggaaggcatttccgagatccactacatcggaaatctggaaaaaacactggattttgtccccgcctacgtgcgcacaccctggatgatcagcggcatgggcattctctacgggaaaaaataacttatatccgtttgcgacatgtttcctataatataaaaagacatgcaggtttaatacccgcatgtcttcaatgtccagtcgccgttcccggagcgcaccagtacccactgccagtcctgatatatttcgtttggattgaggcttccgtctccgccgtgcttgtccgtctggaagtctgacagaagaatgaccgcctgatccgcctgatactcctctgcatattccgactccgcttccctcacgctctcctcatcgtaccagaaagccgtcatcacacatcccggaaaatgatcgtcgaaatactcctgcgcggtatccatcgccgcatcgatctcctcctgcgaataatagtcggacgctccgatctctctcttgactccactcctcgctccgttgccaaagcatacagcgatcactcccacaaccactgcggcgagcagcacagcacccagaatctgaaagatcctctcatactgctttgtccccatgttctttaccccttattcctgttttctcaaaagtaaatgcctgcgcattcctgtctttttatcatactctgcctggcaccattcgtcaatcatccgccacagaatctttcacataaatacagaaaaagcggcagcgtaacaatcatcagtatcgtgttctgcatgaccgccgtcgccgcaaacgccggatgtgtatgatatttttgcgccatgatcacattcagggagccggacggcatcgctccaagcacaacggctgttgccgccacttcgtaatccacaccaagcactctcatcacaagaagggttaccgccgggaacaccaccatccgaagcagactcacaccgtacgcagaccggtctgtcaggattgtacgcagatccatttccgctatttctgcaccgatgatgagcatagagaccggcatcatcgtatcgcccagcattctaagcgcttccgtgacaactgccgggaaacgccatggcatcatatagatcaccaccgttgccaccgccacccagatcatgacattggaaaacagcccgcgcacaccgcagccctccctgcccacaagcagatacagaccatacgaaaaatagaggatatcaaacacgcagttatagatcgcaccgtaaagcatgccgctctccccgatgagctgcgtcaacacggggagtcccacaaatccggtgtttgcaaatgcgatcaaaagcgtaaagattacacgcttttttctctcaaacccggcggctttcccgacacacattccaacagcaaatgctacgccgtaatacactgctgcaatgagcgccaccacagcggcgccgcgcagccgttccatccggaaggtctgctgtgacgaaacaagcatacaaaccggcatcagcaggttcacaagaagtcctgacagcttttccttgcacacctcatctatcaggccgcatttcttacccgcaaacccgactgccataagaatcaatattttaactgtcaaaccgaatacaagactcattttctactccaccaccgcatctattttctcttgcgctcccgccagaaaatagcccatgttggcaccgctgatcctctgaagctttagaatggattctgcactgtaaaaagcgctgtgcggtgtgagaatcacattttctctgccaagcagtccgcaggaagtaagatccggcgcctctgcctcaagaacatccagaccggctgcacggatttttccactatcaagtgcttgctgcagcgcagcctcatccacacatctgcctcgtccgacattgataaatatagggttcttttgcatgttagaaaatgcccgctcatcaaaataatgctcattttccactgtcagattcatatgatttgtgataacgtccgcctctgcaaatgcttctcctgccgatacaagccgcacaccgcggcatgcggcatctttttcgtccgcatacggatcgactgccagcactttcattccataagctccggcgagcgcggcaacgcgctttccgattttcccgagcccaaatattgcaagggtctggccgcttaaatttttctcgccgccgatcgtctgatatttccactcatgctctttttccacacgctttgtgtaatactttaagtggcggtttaaggcgccgatcagtgcaaacgtgtgctcggcaacctcctccgtgcaatattcccggatatgacagactgcaacatgatgccgttttgccgccgcaacgtcgatgttggaatatcccacaccgctgacagagatgcatgccagctccggtacctgtgccagaatctccgccccgatttcaaggaacccggtaatcagtccgtcagccccggcgagttcctgtaccagttcctcatcgcttacatacgggcggatcagacattccaccggctcaccgagtgcctcgctcatactgctgatggttggctcgtaattaggctccaacgcattcgtataatcgcatatcaatactttcttcaccgacagcctcctttaaaatctccctaatggcgatctccacaacttccatctcctgctccgtcccgatcgtgatccgcagatacttcgtaagtctctcatccgcaaaatgacgcgtgaggattccctcctccttaagccggtcacacagttctccggaatcaatggcatcgtgatagcagaatacaaaattggcctttgagggaatgacatgaaatcccatacgttccaatgccgctttaaaccgttctctggccgcaaccgttttcttcacgcagctatccagataccacgtatccttcaccgccgcaatccctgccgccattgtgatggaatttaagttaaacgggttaaaggagaatttgattttgttcatatcctcaatgatgtcacggtttgccaccgcaaatccgatgtgtgttcctgccatattccgcgacttggaaaatgtccttaccacgacgagattcggatattttaccgccagcggcagacaggtctctccggaatagtccgcatacgcctcatcgataattaccatgcgctcgggatttgccttcacgagccgctctatatccgcaatcggaaccgtcattccggtcgggttgttgggatttgcaaatataatatcccctttcagatccatataatcttcaatgtcaatggaaaaatcatctctgaccggaatctcttccatatccagtccataagtttttgcgtaggttctatagaatccatatgtaatatccggaaaatagattttcataccgcgtctgaaaaagctcatcagtacaaaactcagcacttcgtccgcgccatttcccacaaatacctccgcctcggtcacgccatatacctccgccaccgccttgcggaattcatgacaatgcggatctgcgtaataactcatattccagatctcaccttttgatatcgcctcaaatacccgcggagacggtggcatggacgattcatttgcattcagcttaatgtagggcttatctttcggctgttctcccggaagatagggctccatatctttatattcatctaccagaaaaatactcatattttcttatcctctccaacctctgtttttcatacgccatgccgcggattctaaccgcgcagcagcgggaatgtcatgcaatgcggtccgccgcccgcctttaatatctctgtaatgtccagctcgatcacgtccattcccctggctgccagctgctcatttaccgccgcgttgcgttttaatgacaataccctgtgatctccaagtgcctgcagattacacccatgcagataaatggcttcctcgggcacatctataatctcgatatcgcgcgcagcaagcatcctgcggaagtcctccggaagccccctgctgtaagagactgccagatgttcatccaccaggttaaagcacatatccagatgaagatactcctgctttaccggaacgcccgtcacctcatagcccagcggctctaagattgcccgcagttcccgcagtccggcctcattcgtgcggtctgccatacccacggcaatccatttttcattcatgaacatgaaatccccgccctcgaacagcccttctttgacctctccgatcatcggtacgccaagttcttccatgcgctttttgtaatccacatgttctttgtagcgcatatccagcttaaagcgccccataatatatccctctttaacgcacccgccaaaatctctggagaatacagcgttcggacgcatctcatccggctctaaatattcgacctccacaccggctttatggtaggcatccacaaactcctgatgctcccgcagcataatatcaacatccatcgtcgtgtctttccataattttgcgatctcattgatcggtgcaggctttaagaactgcggctttgaaaccagtacctttttcaatacgcttgttccgtcttttacatacatacttcattcctcctatagaaaattctttaacgcttttataatcagttccggcagtacctcaaagctgtatggaaggtacagccgctctgtccacttgtgtgcatccttgccgtacacgccgaagtcaaccgcctttatccccaggctgcagatcttctccagcggcagcggatacagttgttccatctgcggaaaattgctccgtagcagcgcaatcgattcttctgtatcatcaatggcaagataactgctatcggaaagactcgggaaaaatttgcagatctgataggaaaatcccgtctcccgctccgtttcccgcacaattttctcaagcttttccatatattcggcatcgtctttctgcaatgtgttgtgcggacagtacggcgcggcgaaatagagcacgacgaccgggtggtaaatatttgcctttgccagcatcaaacggatcagggaaaccggcagttcacgtttatcgcagttctccctcaaaagcctgtctgtttctttatcaagttcactgtcgagaccggtacagttttcttttgcagcttcatacaattcccggtaggtcatcactccccagcgatccaaaaccggctgcaccttttttccggaaagcgcacagaaccggcggtaattctcattgaccgactccatcgaccgctgcaccgcgcgctccgcggctgtcacaagcttttccgtaacctcctccatgccggcattgtgcacaaagtaattagtacaccagcgcttcttttgccgtctgcacattataccagccctttaagtccttcatcttaagggcaacgggcggcagtgaatattccccttcatatccgtcgcagaattctgtattgagattgatcaccgacaccagatttgcggcaaccgttgtgggatcatatccctcaaagcactgtccgacatgagtctcctgcccccggatataaaaacagggaagcaatttccccaccacaccgctgtaaatataatgatgcggatcacccggatacatggggcaggtataatcattattgatcgcaagcacatacgtaagaccatactgctttcttatctgttccaggatctcaactccctcaataattcccgtatgcagattctcctctaccggattgatcgaaagcagaatatttccggaaaattccttcacatgctccgcaatatgccgcataagcaccataaagaccgcatcgccgctcttcatatcgcaggcgcctctgccaaacagatactcccccgactccagatctctgcggacttcatccggcagttctacggcagcaagcttcctggcaagttcgtccgggtcaaacgcatactcagcaagtacaccgtaatcctccacgccgacggtatccatatgcccgtgaaaaagaaccgtgtccgcgttttcatctttctctccgcgcagcagcgcaaacacattgcgccgccccagcgcatcattttttaattcctgtacgattacctgatccggatgctctttaaaatacggaatctctctcatatatttttcaataaaaagcccgatctctttttctcccggcgttgtattcacgctcggaatccgcaccatctgtctggtaagttccagcatctcatcccgcatatctctctcccgtctgccgcattttcctccacagcattcctgtggcattcggcttgtgcaataaaaaagagacttccggagcgatctccgaagcctctttgctttcatttattatgcgattgtttttctctggttagaatcataccaaaagtatgtgccatatactatggatttctcccaaaaaatccgagatatttttgtattttctacaaatatgtgctattttatacgaagactatgaacaaggaggactcacatgctcgacgttgcatctcttgaaaaatttgacttctgggaccatttcaccctgatctccggtgcctccggtgtttaccgcaatatttccaatgtggtcattcttgattatgaaggcattgagggcgacttcagcggcttccatgagggcgacttcgtcatcacgaatctgcttttcgcaaaaaatgatcccggaaaaatttatcccgctttcctctccctcatcgaaaaaggcgtctccgctttcgccatcaaaaccgtgttttattccgatcttcccgacgaagtcatggctttgaccgagcagcggcaggttcccgtatttttatttcatgatatttatattgaggatgtcatcttaaatattacggatcatctgcgctctctgggcaactacagctattatgaggagcttattgatacttttgtctgccctccggtgcatcacgatgctatccacagacttctggcaacgctgtttccctccggcgagggcatgcttttatacccgtttctctcctccgcctatctgctccgtccggcattgatgaattcagtctgcagcgaaccttaaaccggctacagcttcagatccggcacatgaaaacatctgctcatttacaggtcataaaatacagaaaaggcattctgcttctctgctttttcccggaagaaaaggcaccggaagaaatagccgcgctgtggaaatccattttagcagagctgatgcttaccaattatcttgcaggaatcagtgatcttcctctgcctctgtccaaaatcgatctctccgttgagcggagcatccacgcctgcgaaagttctaaaagccactgcctgccgcttacccgctacagcgagcttgggctctccaacctgctctactctctgtcaaaggatgcctattcggcggagtatctggcagaactgtctacgcggctctccggcgaaaaatacgctcctctgcgcgctaccatgcagacgcttgtggcgcagcactttgatatcgacgagacagcacgggctctctaccagcatccaaacacgatccgctatcggatcagccgtcttaaggaacatctgggtgtgaaaagtgagctggagtttcaaatcctggcgatcttacttacggtcagtcaatcagatcattctgaaaacgcgacaggtgctcatacggaagaatcagccgcccgcggtacagcccgcacccgtcattgatgaggctgttgtcgattgccgcaaacatattgacgtccagcttcgcaagctccagttcgtgcagtctccggcagcgctcgtaggcttcatcaaagtagacacattccccctcggggatggcgtcccttctcgcccggtcgctctcctgctttttctcataccccagatgattggcgggtccgatctctgcaatatcgtccatccgctttgtccgaagctgcatctccatgtagcacttcgcgctgttatcaaagaaggtaatatgcagggagcggtagccgtccggatccacatgcgcgatataatcgcggtaatacgggcgcactgcatccgaaagcagcggggagtcgctctccttcacacctccggcggactccgccgtaaatccgcgctcctccagaaatcctttgagtacattggcaatctcatacagataacggacctcctcccgctctccgtcgtccggattcttaagatggcacttcggcatcgagatgacaatccggtacgcgatcaaatcccggaagcagtttaagcgttcctgtaattccgataccggcggatacgttccgttcttcgtatagtagtcatagatgtactccaccacataaccgttgaacttcgcctccgcacggatcaaggacttgatcctccctttgaacgtgaaggacaggtagggatattcccgcgccatatatttatagaattcccggatcttctgcgactgcgccgtcaggaaatcattatgctcgagcaattccataatctgcgacagaaattcacagtgcctgacatccacttcattcccggtccgtgctgcggactgccgcaggtcttcggtatattttttcaaaatttttaagacggtgtctccggaatagagataatcgtttaatgtaatcataggcataccttctttgggtttctacctatattttcagatatattttttatctcgtcaacacctttttgcagtaccggtgcgccccgcaatgcgggcataccagctttctactggtcagtgtgtgcgctcccatgacataagcgcccatctcaggcacaaaccgcgtcttacactccgggcactcataagctcctgcatcacgatcaagaatgcatgcaatcgcaatgccgatcacaatgacaactatgccgactgcaatcagcgcaatacgcatccagtcctccatcggaaatgctcccgctaccacaaacattggcgtagcagcaataatcacaagcgccgataccattccggcagcagcaatgaaatctccggaaacccatttccgcgctcccattttgagatcgtcttatcactgatttccaaccgctccgccagctgtctctgcgtgtaaccctttttctttctctcgtctgcaataaattttcctgtcttaatctgatccatgtctttctcctttccggtctcattatgttcccgctcccacggctttcacacacacgcaacgtagaatatagtgaatttgtgcggattctacgctacgtcgggtggccccttgcccgcgatctctcagttccatgaccattatcattggccttaggcactacagtttccctctccggctgctacagatccagggatcgacagctgcagatccagaacccggctgctacagatccagtacctcgagatcttccggcacgtaaagatttccgtggtaatagttttttccttcttccgtgtaaagttcctttcgcctgccaagattcctgtcctcggtgtgatacagtaccagattggccgctcccatggtctctgccagttcacaggcatcctttacggtcgagtgatgtttttcatacggtgagaaaatgtccgcctgagaatgcaggcagaacgcttcgtgcaacagccatgtactgttttccacataacttttttcgctgtcgttgtatggctcatctccgcagcaggtcagttttctgccccctcccagatccatgcagaaaccaaactgctttgctttcgttgagtgaatgtcaaaaaacgttgtcgcccttcccagaattgtcttcgtctctccatcttccaccgcaaccagatgaagccgctcgtccagaaatttcgtctgcttcttttgcaacagattttccgccattccccggagcagaccgatcacctcgtcatgcgcgtaaatggtggcttccccttcatactgcccctggctcatatgctgacagatcatgcggatcatccagaccgctcccatgatatgatccaaatgcttatgtgtgacaaaaatggttctcatatccttcctgatgttgtataaataaagttgacaccttattctcaaggaattcatgtataataaaagagaataaggaggaactctcaatgtcacaaacccaacgtaaatacgaccaggaatataagatccaggctgtcaaacttgccaaagaaatcggcggtgctaaggcagccaaagaattaggtatcccagaagggaccatccacacatggctgaaagcagttagagcaggcacattggatattggcgacggtgcacatactccggaaagcgcgatgagtcttgctgaggagcttgccatgctccgcaaacgcgttaaagatcaggacaaagaaatccggcgtctgaaagaggaaaatgaatttctcgaggaagcaagcgcttttttcgcagccagccgtcggaagtcagcaagaaccaaagaatgatgttcattgccataaaaacgaaagacggcgtgattaagggaaaactctcattctattgccggatgcttggcgtcagccgccagggtttctacaaatatcttgctattaaagatcgcccttggaaatatcaggatcttgctgatgccatgagagcgatccatgctgaggatgaatgcaatgatacctatggacgtattcgcatgtaccaagcactgctccttaagaatccgacgggaatcaagatccccagtgaacgaaccgtttacagggttatggatgaaataggacttgtccatcggccaaagcgcaagccaaatgacattaccaaggctgatcgggaagcacgtaagtcagatgattttctgaagcgagagttcaaggctgataagccacttgaaaaatgcgtaactgatatcacagaaatcaaggcgaaagatggaaaactgtatgtttcagccatcttcgactgctttgattccagcgttctgggactggcaatggaaacaaacatgaaggcaactctgtgtgagcatacactggataatgcctatctggcgcatcctgatctgcgaggtgccattgtacactccgacagaggaacacaatataccagtgaaacctaccgtcaggcgctttctaaatatggcattatacaaagcatgaacagtgctggtggcaggtgccacgataatgctcgatgtgaaagcatgtgggccagaatgaaaagcgagcttctctatgaccgctacaatacggaaagcctgaccacggatgaactgaaagttcttatttggagatatttcatcaattactggaacaacaggaggatctgctctgccaacggtgggcttcctcctatgattaagcgtcagagatactaccaatctctgggcctggctgcataggaaatgatatctttgagataaatgtgtcaaccaatattgacaatatcacaatgtacaacagcattgatgtcacgcactacaatggatacatcttacgaatcaactgctcccaagcagaaaccggaatccggacaacacctaattcccaatgtgcccttgatgctttagcgattgatgcccctctggaatatgcaaaacttgctcttgatggcgagatgcaggcatgggtggatgcggaggatagtttggaagtattttaaacatattattttcttaggcaagttcctattttctaatagtacttgcctattataatgtcctatttgtcctttattttgtcttaagccaaactgattattttcgtctttcgtgaactataatatactcttttgtcatagaatctactggttttaaatcaaccatcgaggttacttttggagtccgtttatttggaatctctctttccgcaaattcaatatttttaaattccctactctccagatatttttgcgttatttctgttaaattaattttaattcgatcaaccgttctattacctaatgttaaaacaataaacttatccgtaactttgcacaaaccttctaaccaaacaaaataatcattaaaaaatcgaattaccttttcttgtttttcaatagatattttgtctaaatatggctttattaatcctttttcaaactcgcctagttttgtctcctttttatttcctcccagactcattctgtcaataatcgaataattgtccaactcccaaccttctaattccaaatctctcttatcaataatgtataaatctaacatagaaaattgaccatatggcactgttgtagcattatctccataaggtggtgaagaaatagaaatatcaaaaattctcgacggcaattctttgagcagacctaatacatctctcttataaagaatataattttctgtacatttctcatattttttaaagttctgttcaatagcctttatataatctttaattaaattattttctattctttctattttttcactttcttttttatgtaatttgtatgtggaacttcgtgtattactatatttcctaatacaatcgcagagcataatccaaaaaaaacgtctgtcattgtcattttcaatctgcaaaatagcagccttaataatactaagtgtttcgataatatcttttctaaaccacttttctatattgggaaattttattgtttcaaccacacccgggttattaatatgtttaataagtaatgtcaaactatcttttatattctttgatacaccatctaattttactctcgtaatcaaattggctagcggatttatatcgcatcctacaagatgcaaatttgaatcaatctccatcgcttcatatagcgcagttccagaaccatgaaaaggatcaaatacagatgttattttatttttttgtattaactcagtcaaaacttcattttggatgggtgctatcataactgccggatacagaacagttccatgtatgtcctctcgttttttataatcactatactcaatattttccaacataattgtatcaatccttttcatcaaatcattgtatattgctattattcagcatttcatttacaagaaccaaaaaaagtcctattaaattgcccaaattatctacatccatttcagaaatatacgtcatggatttatgagcacccaaatgtgcttttgaaaccccagtctcataagctgattcgtcaagcatatttcctaaactatgataatcaatcattgctgcggttgctatttcactttgatacttagggttactctttatatatttaattaccattgatactttttttgaaaaatccttttcgtttccaaaaaagttgctgtacttagtggacttggatattgcatccaaactaatttcaaataatgaacgtaaacaacacgcaataatttctttatacgattttaaatccagttgattaatttgttctactattttatttatatatggattataattcaaagtataattttgagcagccggtatcataattaaatgaggttttgtctttcctgaagaaaaatctgacattctcacgacaaactctaatattatatttttaataactaatcccgtttgcgaatccaaaaaagaatattctatgtttagtttttttgtacttgtaatacttggtaaaatattatttacttctttattatcaatttttacttttacttttgatttatcaacatcctctcctttgctatttcgaacagatgcaatataactaaataggtcgatttgttctgatggaatctggattttcatgtaatcattcacatttagccgaataattgcagggattgttttaccatttcccgtcttattttcccctttactatcagttttcgttttcccttgtatagtcgcccatacttcctttccccataaagcaaatttaatcttattattgtgtctttctatttctactaattctctaaatgcaaaatcactgcaaataaattttctaaattgttcaacatctgtatatgtatcacattcttccggcaattctgaactagtcaaaattttaaattctttcaaatattttttatgttgtgaaccaaccgtttgtatttttttatttatttcttgtaaaacagtcttgatttcatccgtcaattcgttttgaagaaattgcgaacgatccgaattaaaattaattgctttatccgcactaattatttcaattttacctatcatttgatttaacaccaaatcagtcttaatatttttcattatattaggatcaaacatatcatagttgttaaataaattacaattaacatacatcaacggagtcaagtcatttttaggattcaaatataatctgtcaatcttatttttcccatgtggaggcaactgaaatattactaattccaatcccagtttatatcttgttgagtcaacgaaaaatttctcctcaataataggaaaattattatataaaaactttattttaccatcatcgttattgtaagtaacctggtatagtctataatctggtgcattatctaaaagctttatagaagatgaacttttatatacaatcccgtcaatcttaatattaatatcaaaagtatcatcatcaaatgcatttaatattttcttataattcttttcttctttaaagtagtccaacaaagaattcatattataatcgtctatactaatttctatttttgttcccttctcaatagaatcatcttcaataagttcaataacacattctgaaatatcgtattgtcccactaaactatcataatccaaactaaaccgataccccttgtctttcttcgtttcccattgaactttatgtccaaatttaaatacagacaaaaatcctaatcctttagaaccctgaacatatctattgtattttttattaagacttccatatattttattactgtttgatatatgaaacaacgtatcaatatcgcttttattcataccctcaccagtgtcttttattatcaatttcttttttgtagaatccaaactcacttctacacttggtgcacccgcatcatatgcatttttaattaattcattcaatgcaataatatttgacggtattttttcagacaattcactcacaatatttccactaattgttactctactctgcatttttatctccttgtatttaaaacatgaattagtcacctgaattaaactctactagtttttcccaatcaatactgccgtcctctttgcagaaatcatttgagaattctcgcaccaatctatttgctgctttattataactttcttggtactgtgctacatactgttctggtaatgtacccatatatgtaataatcttcttgtaaaattcttcatctccggtcaattctgtccaaaatttctttccagccagttcctgatacatcttaggttttccgcgaccggaatctttctttttaccataacagtatcccacatatgcctcatatcttgcctttgcttgctgtgcaagttttgatgctgccataaaattttgttcttggcgttttttactatcagcattgaatacagatggtccactcttaacagcaatcgcatacattgtgttctcacccttatcttgaatcatgatatcaatgccttctgcaagagccttatttccattactcgcagcaattgcaataggctcgaagaaacaattaccaaatatggtttcttcactcgaactcacaaatgctgtaagcacagattcaacaatttctgctgcattctgcatagcttttgctcgatataaatacggatttttccttttcattattttttgaatatttaattcgtctatttttgcaatcaaatttgcatagaaagtttctaatgcttgtgcaattgcttctatcactgccttttcatcataactattatttattggcataccgcatttcctcctaattccaatgcattttttattctattatgaatatcagttcctctaaaccttttcgttttaatcaaagctgttttatctgctgttgcaataactgcacgtccaattgcctctgccaagccaatcggtactgcgtttcctatttgcctatactttgcagctgtggttcctataaatttccaatcttccggaaattgttgaagacgtgcatactcatgtacactcagcggtctattcattctaggatgacacatcattgtcgctttctgaacaggtgatgtcacaactgtaggtgctggttggctataagataatcgtctataaaatcctacttttccgccaccagattcatatgcaccacccattgcaattttctttatatcatctggcaaatctttccagtttccaccttccggaaccatttctaagtaatgtgctcgctccatgcttaatgttgcacattcacctttttcattttctatatcactgattacttctcctactgttttccacctatactcttccttttgatgcatctgaaaatgtgttggaactggcaaaaagatgtcttcgtggtctctacttccaatcaatacaaacctttctctaaattgcggaactccataatttaccgcatccagcacaccataaacagttttatatcccaatttattgaattcggataatattacatctaatactgttccaagctgttgttctgggtcatccgcatttctttctgctatcggaacatgttttaaaggcgatgacattatgcctttcacattttccattataaaaaaacgaggtttaatataatcaatcatacgaatataatccataaataaactgcccctaggatcattgatacccaaccgttttcctgctgttgaaaatggttggcacggaggacccccacatactaaaaagggctctcctacattcagccctgctaaatccaacatttgttgtggttcaatttttcgaatatctccgcctaatacttcgtgtccatttgccttcattgtttctacacatgctggttcaaaatcttgtccaattttcacattcaaccctgctttttccaatcctatgtccaatcccatcgcaccagaaaagaaggaaataacatctctattagaatagtattgactataatcaattctttttttactcattatattttatctccattctctaatacaaaacttctttcaaatgtacaatctaccacttccgcaattttttctaaatcagaaacagtaaatgtctcccttttaagtttagcattaaaattctgcggtgatgttcctacccttctagccaactcagatacactaatatttgaccgtatacataatatttttatttgctccgacacattcataatggtacctctttcaaaaatcaattttacaatttcaagtataaactttgtgttttaaactgtcaatcattttatagtttcttacaccacatgggtttcagtcaaaaatatattcttatctaaaaaagaagtgtcacaaaacatctttaacttctcattctgcaacacttctatcattatatcatccagccactttctgccttacccattccttcacttcgccaatccgctcccggaacacctccagcatattccttccgtttatcacgaactgcttcatgaattcatatgcttcattcagcttgtaccgaagtcctcgattctcctcctgaagtttctggttttcataggtaagattgaccaccttatctaccaaatctccataatctgctccggctacaatctcagccctgacttcttccgctactcgtttttgctcctcagcctcggctttcgttgcctccagattgtttaactcagattgtgccctctccacttctttctttttatctgtcagtttctcgtctgcttccgagcactccttctttatctgctccgctctgacatccagttcttccaactctttctgtttctgctccaacatggtatccgttagagttagtcttaattctttggaattaatctgactgtcatactgtctgagctgttcttcggcatctctcttaactgcttctaaagcaagttcattccgttccctctccttctcagcttccaacgccttttcagccgcccgttccctccgatagtctgaaagaagtaaatccccacgttcattcttacccttaaacaagcgtctccagccgatttccttttccatataatcggcgagccagtttttctgttcctcaatccattccactgcgccgaaagaggttcgctccatctgcggtttctttccctccggcgtatcaactcccaaggatatcagagcctggcagaataagatgattcaagcagagtattccaattcctaccttgaccggatgcagaatatgataaccgcatttttcaattatgcagtatcctatttcgccttatccgagaatccctgccgcaaagccggacgaatgggaaaacgggaaattgtagtaaatttctggacgaagcaggaatttgacacaatactttccgccatggaacacgatgcaaccgcacacgtatccttcctgctactgtactattccggtatccgctttggagaatttctcgcactgacaccaaaagactttgattttgagaacaatactctcgatatcagtaaaagccttcagcggattaaacggcaggatgtcattacaccgccgaaaacaccaaagagtatccgtaacatcatcataccggacttcgtaatggaagaagtcaaagattatatgtcaaagctgtataatttgaaagatacggacagggttttccccttcaccaaatctttcatcaacaacgcaatggctcgggcttgtaaggcaaccggagtgaaaaagattcgtatccacgatatccgccactcacacgccagctatctcatcaatctcggctgtgcaccactgcttatctcagaacggttagggcatgagaaaatacagactaccctgagcacctactcacatctatatcctaacaagcatcaggaaatagtggacatcatgcagagccagcatcagatggatgtagcagaagcacaaaagaaaggctcgcaaccaaagagcaaaaagttcaaagttgtaagcccggagaacattacaagtccaaaacaagtccacgaagagccgttggacaagtgtgtcggcttcgccgaagacatttaaaaaggctcaaccccttgtaaacaaagggctgagccagttaagacaattaatactcaaacagtatttaattactcgataactgtagcaacacggcctgaacctacagttctaccaccctcacggatagcgaatgtaagaccctgctccatagctaccgggtgaattaactcgatagtcatctcgatgttatcaccaggcatgcacatctctgtaccagccggaaggttgcaaacacctgttacgtctgttgttctgaagtagaactgcggacgatagttgttgaagaacggagtatgacgaccaccctcgtcctttgtcagaacgtaaacctgagctgtgaacttgtgatggcaggtaacagtacccggcttagcaagaacctgtccacgaacgatctggtcacggttgataccacgaagtaatgcaccgatgttatcaccagcctgagcctcgtctaactgcttacggaacatctcgataccggttacaacggttgtctgaacatcatccttaacaccaaggatctcaaggttatcattcagatgtaatgtacctctctcaacacgtccggtagcaactgtaccacgacctgtgattgtgaatacgtcctcgactggcataaggaatggcttatctgtgtcacgctgcggatccggaatgtactcatcaactgtatccatgagctccatgatcttgtcgccccactcgcccattggatcctcaagagccttaagagcagaaccctggatgatcgggcatccctcgaagccgtactcctcaagctgctcggtaacttccatctctactaactcgatgagctccggatcgtctaccatatcgcacttgtttaagaaaacaacgatgtaaggtacacctacctgacgggaaagtaagatgtgctcctttgtctgagccataacaccatcggtagcagctactacgaggatagcaccatccatctgagcagcaccagtgatcatgttctttacatagtcagcatggcctgggcagtcaacgtgtgcgtaatgtctcttctctgtctcgtactcgatgtgagcggtagaaattgtgataccacgctctctctcttccggagccttatcgatgttctcgaaatctgtagctgtgttaccagcaactcttgcagctaatactttggagatagctgctgttaaagttgttttaccatggtcaacgtgtccaatggtaccgatattacaatgtggttttgttctttcaaacttagcttttgccattttgaatatcctccttaaaatgatgccccttgcgggctatagttattatataagaataactcggctaactctgattatataaaataatcagcggtttttcaagctatttcttaccggatttcccctgtttatgggaaaatccgggatttttacaaactgcatacggaaagcttatttggacttgtcagccaataccttctcctgtacactcttcggtacctgctcgtacttctcgaagaacatcgagtagttaccacgtccctgtgtcttagaacgcaggtctgtagaataaccgaacatctctgcaagcggtacatatgcctttacaagcttaccgccgccgatatcatccataccctcgatacgtccacgacgggagttgatatcaccgataacatcacccatgtactcctcaggcattgtaacctcaaccttcatgattggctcgagtaataccgggtttgccttgtgcatagcttccttgaatgccatagatccggcaatgtggaatgccatctcggaggaatcgacctcatggtaagatccatcgtatacgttcgcatgaacaccgagtaccgggaatccaccaaggatacctgcctgagcagcttcctcgataccttcgccgattgccgggatgtactccttcggaatcgcaccgccgactacggtagactcaaacttgaatgtctcttcaccgttcggatccatcgggtcaaacttcactttacagtgtccgtactgaccacgtccaccggactgctttgcatatttgtattcaacatcaaccggctttgtaaatgtctctttgtaagcaacctgaggtgcaccaacgttcgcctcaaccttgaactcacgaagcagacggtctacgatgatctccaggtggagctcacccataccagcgatgattgtctgaccagtttcctgatctgtatgagcacggaatgtaggatcctcttctgcaagttttgcaagagcctcacccatcttaccctgtccagccttggtcttcggctcgattgcgagctcgataaccggctccgggaactccatggactctaagattaccggatgctgctcatcacagatggtatcacctgtcgttgtgaacttaaatccaacggctgcagcgatatctccggagtaaactttctccagctcctgacgcttgttggcatgcatctgtaagatacgtccaacacgctcttttttgtcttttgttgcgttcagtacataagaaccggagttcattgtaccggaatatacacggaagaatgcaagctttcctacaaacgggtcagccatgatcttaaatgcaagtgcggagaacggctcttcatcggaagagtgtcttactacctcattgccatctaagtcaacacccttgataggcgggatgtcggtcggagccggcatgtactcgatgattgcatcgatcagcttctgcactcccttgtttctgtaagcagatccgcagcatacaggtactgcagtacactcacaggtagcttttcttaagaccttcttcatctcttcaacggatggctcttcaccctcgaggtacatcatcataaggtcatcgtccagctcgcagatcttctctaccagctcgctgcggtaaagctctgcgtcgtccttcatatctccaagatcatcggtaacggtgatatcatcacccttatcgtcgttgtagatatatgccttcatctcgaacaggtcgatgattcccttgaaatcatcttccttgccgatcggcagctgaagaacgattgcgttcttacctaatcttgtacggatctgatcaacagcgccgtagaagttcgcacctaagatatccatcttgttgatgaatgccatacgcggtacgttgtaggtatcagcctgacgccatacattctctgactgaggctcaacaccaccctttgcacagaagacgccgacagcgccgtccagtacacggagtgaacgctctacctcaaccgtaaagtcaacgtgtcctggggtatcaatgatgttgatacgatgctccagagcacccggcttcggctttgtgaactcttccagagtccaatggcaggtcgtagcggctgatgtaatggtgatacctctctcctgctcctgctccatccagtccatggtagcagtaccctcgtgagtatcaccaatcttatagttaacaccggtatagtacagaatacgctcggtcaatgtggtcttacccgcatcgatatgagccataataccaatgtttctggttctctctaatggatattctcttccagccaaggtatttcctccctaaattagaaacggtagtgagcaaacgctttgtttgcctctgccattttgtgcatatcttctttcttcttaacagatgcacctgtgttgttagctgcatctaagatctcattagcaagtctctcttccatggtcttctcaccgcggttacgggagtatgttgtcaaccagcgaagtgctaaagcctgacgacggtctggtctgacctcgatcggcacctgataagtagcaccaccgatacgtcttgcctttacctcaagaactggcataacattgttcatggcctcttcaaatacctcgagagccggcttctcagccttctcctctactctcttgaaagctccgtatacaatcttctgtgctacacccttcttaccgtctaacatgatgttattgacaagcttggtaaccactttgttattgtacattggatctgctaatacgtctcttttctgagtatgtcctttacgtggcacggttcttccctccttaatcataatttactatacagaactctgtctgcattgcccggtctccagtctctggatccggaggacttcatttcgattaattcaacggtactcacaatgtagtggcaggtatctgcctcttcgtgttcgtgcggaaatatatctctgtgtgaaacaattccaacacttaccatgtgatactattggttcgctgaattacagtaactctacgctactattttgcagcctttggtctcttagcgccgtacttggaacgagcctgctttctgttagcgacaccggcagtatcaagtgtaccacggataatgtgatatcttgtacctggtaaatccttaacacgaccaccacggatcagaacaacgctgtgctcctgtaagttatgtccctcacccgggatatagcttgtaacctcgattccgttggaaagacgtactctggcgatctttctaagagctgagttaggtttcttaggagtagctgtcttaacagcagtacatacacctctcttctgcggggaagaagtattggttggcttcttctgtaaagagttgtaacctctctgaagtgcaggtgctgtagacttcttaacagatgtctgacgtccttttcttactaactggttaaatgttggcattattttcacctcctgttttatttgtatgagatcataaattgatctcggcgtacgtatgcacgctaaatcattatattaaccctatctttttttgtcaagttcttttccaaaatttccttgaatttcgcggaatacgcgggtaaaaaagagttctgcatgcaaaaagaaaagatggaaaactcccaacggatatcttccatctatctattcttccacatttttacatgtttataccaaacgatcagccatttgcccgttttctctgcttctcctgtctctcactggtcagaatcatatagattcccagcagcatcacaccgatgcacagaacatatttcggatttaacgactgtccggtcttcggcgtctcatcctttacctgcgagtcatccgccgcctgcgcattatccgccggctgctccgtctccgccgcttccgtcgtctctgccggctggctttccgcctggcttccgcctgccggtgtaatcacaaacccggaggtcgcctgcgccgttgaatccgagtgacgctcatccactacgatgacataatcacacgcatgcacaaaggaaaatgacacattgccgtccgcatctgtatcagactgtcccatatactccaggatctgattatctacattataatagaacaaagtgcccagcttattggcgttcgccgcaccgacatttacggtcagctgcgccgtcaggccaaacaggttgtcgtgcgccagatgcatctgcgttgaccatccgcttccggttactgtgctctgcaggttcgccggcacattgcttgttcccagttccacgccaaaatccgtatctgctacaacgcttgtgtcaatgctgcttccgtcaatcgtccatgagattccatttcccatatccagaaccagcgtcagctgcttatctgccgccagtgtcagaatatccttcggcacaaccgtggtgccgttcatggtaatatagatcgttgaacctggatccgccaccgtcatctgcgtgtaaatcgcatcccagcccttcagttcctcatttccggtgatatatgcggttccctgctctgcaaatctggtcgtcgcaggcacttccgccgctgtcggctgcacatctccctgtgtctccgccgtcgtcgctgccgccgatccggtaccgctgctccgtgcgcctgccgctccggcactgccctttaccgcaccgctgcctcttccactgccgttgccgcttccgctgcctcttccagatgatgtgccgttactctttccgctgctgccgcttccgctgcccgtactgctgctgttattaccactgctcgtgttgctgctgttattgctgctattgttattactgctgttatcactgctgctgttattgttattgctgttgtcgccgctattattgttgttaccgctgttattattgtcgttgttattgttgttattgtcatctgccggtttttccgtgtcctcggtcggcttctccgtatcctccgtcggcttttctgtatcctcggtcggtttctccgtgtcttccgtcggcttttccgtgtcctcggtcggtttctccgtatcctcggtgtcgtccggcttataatccgtcaccacaatcgcaccgtacgtctccaccagcttcggtgcagccggagcgcttcccggcacttcaatcgagtggatcttgaaagaagtattctgctcgccaaacatttctaaggctttgccaaggcagagcgtctgaatctcactgccgtcaaacgcgccgtcttccacggttgtcacgctctccggaagtgtcacttttccaagcttgcagccgtaaaatgcattttcaccgatcatcttggtgccgtcatatacctcgatggttctcgcaccctgcgggcaacggtataacgtaaccccgttcgccgtgtagagcgcattgtcgtatgacataaagtatgtatttccctcttccacatcaatagactgcatgttgacacatccgtcaaatgcgtccgatgcaatggttttggttgcctcggggatcacgatgctctcgagggactcgcaatttttaaatgcttcttttccgatcgatggaagttccctggaaatacttaagtccgtcagtcccgcacactctgcaaatgtgccgtcgccgattccttccttgctctcccatgttgcgctttccagactggtacagccgtagaacacattgtctccgatctttgtcacgctgtccggaaccgtaacctcggtcagatattcacatcctgcaaatgcgttatctccgatggttgtcacactgtccgggatctccaccgatgtgatcgtcgtattgaggaatacatcgtcatcaattttcgtgatgttatccggaatgacaactgcgttctccgctccgacatacccctgcagggttgtcccttttatgacaaatccgtcctcctgaccggacgctgcactgagctctccgggatagatcatcaccacaagcatggcaacgaccagcacataacctatttttcgttttatccggtatttcattagcactctctcccatcatcctttatttcgccgcagcccgcccgtaaacctcacgcgcgatcccacgcttttactctgcttccctgcatttcttcgccaccagaaacagtcttccgtcttctgtaaaattgttacaggtcgacagggtcaatagctcgtccccgtagaccggcagatctgttccggtaaacaccgagagttgtatgatatgatcgaggtagtcgttaaacgcctcctcggaatccgcctgtataaaatcataataacgaaattcctgtgaatttcggtactgcacctttgccagacagacggcaaacacttcataggtgcctttctcataaattgtatcaaatctgatctgcgcgtgctccctccagtaatcttcatccagatacttcttgagacttccgaacatcgcaccgcttttcatgttgtgtccgtagataataatattggtgctgcgctgcaccagatccgttctcggatccataaacaaggttccgttgatatcgtcctccccgtttacattgcgcttcagataataatccccgtcattcggggtaagcatgaccggatagtcaatcttcgtcccgtcaatggtgatccatccggcaaaatcactgtgctgcgccacgatggcttcatattccggcagaaccggaggaggcggttcgttctcccgctccgtctggtctaaacccgccgcaagttccggtgcgtcctccgaaaaaaaggtgtcattgtccaccatctctgcagcttctgtcggattttcttttaacatcttcaaatactcattcgcctgactgccgcggtgattcgtgtaatctgaccagaaataccagccaaaacatagaaatgcggccgtcacacacaccgcaccgagaatctttctgctgcggtcctgcgccccctgccggggttcctcccccgcctgttgttccggtgcctgtgcctgcgttatattttttgccgcggattttgccacggcatctgcaatatcaagaaaaaatttcttgccgactttgctgccgaacttgatcttccctgttcggatcagccaatagaggcgtagagcggtttccggttcattgagatcgacggtgctctgaatcttttcgattttcttcgcatcttcgagtcctctggcatattcctcttctgtgtcaaatgtaaaattccctatcttatatgccgccatgatcggaaccgctctccctcctctctgtctttattttgtggttgttccggtaactgctccggtaaactcaccgtagtaagtctcgccgtccgccaccaggtagcttcttactttataagagtatgttgtctctgccgcaagctttttatcggtatagaaagcgtctctggtacgcgttacctgctgccactttccatctgcgccggcacggtatacttcgtatcccgtcacggcaccgtcgcccgtccagctgatggacagactgtctgcggatgcgcctgtcacaaccgccgcgcccgcatcgcacggtctgatgtcaaacgtcaggttctttgttgccgtgtaattgccttttcctgcaactgccgccacaccggtacctgccttgcggttgttggaatacatcagtgtgtagtcgcttaaaagttccagggctttgccgtcatcttccaccgtcacggtcggcttgatgtcagatccggtatatacctgtgtctgaatcgaaccgatgtcgcacagatgtatgctcttgcgcaggatctggaagctcagttccttagtacctgcataatgggttccgcttgctgtgattaccagcttcgctacacccgcgttgatgttgtcttcataggataccgtgtaatccttatctttttccagctgcacgccgtctgcccatacttccggctccggtgtgattgcttttccggtataagtgtaagtagaagaaacacccttcacttccagtccgtcgatcggcgtctggtctacggaaaactgttttgtaacggttcctgtatagttgccggttccggctgcctccatctcgtaggttcctgccactcctgccggtctgcatgttacggtgtaatcggtgtctcttacgagtgcgatctcaccccactggaacgttacgttctgtgtaatctgctctgagtaggataccgtgtcctcaaatccgctcatcaccacatcttcatcggtgatgtccttcggcgtaatctcgatggtgcatttcttggttccgccgtagcttccctgaccgatcagaagaagggtctgtgttccggcgctcatgccatcgctgttttcatcaaatgcaaagctgtaggagtctgttgtaaggaccgtttcgccgatgcgtacctctgtaatgcccagatcgtccggcgtatatgcgcttcccgtaaacggatagctgtcgtcaagtcctatgacctccgcctggctgatgtcgctcgcaatatgaaatgtggcctggcggtaattcgtaaatccaccggttccgttgatccgcatcagcacagtgccgatctctgtgttgtccgtgtcaaagctcagcgtgtagtcctcaccctgctttaaggtataatcgccgcaggtcactttcacttccggaattaccggctgacccgtgtatgcctgattcggaatcggatccaccgtcacatccgccgccgcaatatcgtggcttacgatggtaaacggtgccgttacgcttcccgcatagcttccttttccggtcacggtcacagtcgctgtgccgcacgccttgttgttctgataagatacctcataatctgtacccgctgtgagtacattgccgtccagtgttacctgcacttccggttccaccccgttgtcgcttcccatatacggataggaagttccgttcgggaacgtgacaatcgctccgtcaaagctcttctccgtaatcgtgtattccacggtgcgggatcccgtataatttccgataccggaaatcaccgctgtcgctgttcctgcattgatattgttgctgtatgcaacggtaaaatcgcttccctctgtcagctgacgtacctcaacctctgttccgtactgatatgtcacaagaacagtcggcttcttttccgttccgtcataagaaaagctgtccggaatcacttctaccgcaatcaggtcggtgccggatgacggttttgccaatgatttcgccacgatctggaaggatacttcacggcttccgattacgttgcttccatcaccggtaatcacgactgtaccggttcctacattcgtattatccgcgtctgccttctttgcaatggtatagcttcttgccggcagaatgtaatccgttgatccgatggttgtcttcaatgagaactccggcacaatctccttaccggtgtactctctgcttccgatcgcgttctgcgttccgtcaagcaccttcaggtcgtccatctgaagtgggttaatatcaaaggttaccagcttgatcagaccagcatactcgttcttaccctttaccataatgcttccgccgtctgttcccgccttgatattctctccataggtcacatcataatcggacgtggacagtgtcttgttccctatcttaacggtaacctgcgggcggatctgtgttccgcggtacaggtagctgctctctacaccgcttacctccagaattcccgcatttgcaacaatgctgaaattctctgtgagtgttccggtaaatccgtttttctcatttccgattaccgtcacgctcgcagtcttatcaccgatcttcacgttgttttcgtatgtatgaatcacaaagtgctttccggatgtcagctctgttccgtagtagctgatgctcgggattgcctccaccggatctccggtatactgctgatctccgattgccacctgaatgcctgcctccgaaagatccgctttgatcggaaccgtcttctccacgcttcccgcaaagcctcccatacccttgatggtaactactgcgttgccgacccagctgttgtctgcatagaccagcgtatagtcggtatctttctgaagtgttgttccgttcagcacaacactgatctgatcgtcaaacgtgatgttcttatcgccgattgcaatgtccgtctctccggcattcacataatctttgaaccacagttcatccggaacggtaatctcggcgtccgcaatgtttgcgcagatcttaaaggtcttcttcacgcttcctgtgtaattgccgattcccttaagaatgacaaccgcgtcggaaccaatgctgtcgttcttctcataagtacagatataatccgtacccatgacaagttctgttccgttatagtacagcttcggctgcggtgttgccgttccgtccaccagcggctgcggttcgatcgctccgatcttaaagccgtttgccggtgtatatccgccattgccaatacttgcaagtgtgatcgtataggttgtgcttctcgatcctgtaaagtccgtaccgtcctttgccgttgccgtcagcgtcacggttccgcggctggtatgatccgccccgtaggataccgtgtaatccgtcgtgctgatcttctgtccgtcataagtaagctccacttcaggctctaccgggcttccggtatactgtgtctgataacttccatcggtcactccgccgacagagagctctacgctgctgtccgtaagatctctcggtgcaatcgcaaaagtcttctgccatacaccgacgtatcctcccagaccttccacgcttaccgttgcggttcccgcgtggatattatccgtatatgtcacggaatagttagaatcttttaccagctttttgttgccctcgatccgtgttaccgtcacctccggctcaaatgcacttccgtcataaacatactgtgtgccgtcggtgagtgccgggcagctgatcgtaaatttggtctcgtttgtgatgagctggccaattctgaattctgccgtcttgcttccggtaaagttgccggttccggtcactgtcaccgttgcggttccggttcctttgttgttcgcgtaagccaccgtgtaatcgttgaccgggcttaacgcataggttccgtctccaaattcatagcttaccgacggtgccggtgtgacagccattccgttgtactcctgcgcgtcgatcggtgcgatctttacctccggctctgccagattcttcggcgcaatcgtataatctttcgtaaaggttccctgatagtttccttttccggtaatcgtcatcgttgcggtcccggcatccacattattttcgtaggaaatcttgtaatcatcctcgccgagctttttcttcagatctgtgcactgtaccgtaggtaccggtgtaatctcttccgaagtgtaagtgtagccggactttaatccgccaagcgtgcagttgttgtccaggcttctcggcagaatcgcaaatgtcagtgttctgtcatctgttccgtagtaatcccccttaccggaaacggtaagggatgcctcgccggcattcagattgtccgcgtaggaagactcgtcatacgcgatcactttctcgatctcatcggctgtcgtaagctttgttccatcgctcagcgtcagctcggtgatcttcggatacagacgctcgccggtgtaggtcgtctcgttctcatccaccttccagctgatgatctcgtccagggattttccgctgatggtgaatacaataatcttcgttcctgtgtagttgccgttaccctgtatggtcacatttgccatcggtcccggtttctcgttgttcgcgtagctgccagccacgatcgaatagtcggtcggcgcggtcaatgtcttcttattataagtaagctttatctcactttctgtaagggtcactgcatttccgtcgtacgctttcttgatcgcctcgtaggaaacaccggttgcaatgtccttcggacgaatcgtaaaggttgcactcagttttgtggcgccgtcgctgtacacatagcatccgtttgccgtcggctgatcctccagcgggatctgctctactgtaaccgtcgcctccccggcattgatcgcctgatccgcgttggttccgtcactgtagttgaccgtataatctgttccctgctcaaggacgctcttccagagtccgaatccgccgtccgataccgaaatctcatccgtagcaagcgtaatcggatctcctgtgtataccgggttttctgccggattcaccgatacatcataatcctcatcaagcttggatgcgagcagatacttgatctcctgcttgccatagaatttgccctttccggtaatcgttaccgaagcagtgcttccttcttttgaaatatccttgatgccgtcatactttaattcgtaatcagttccttttaccagcgtattgccctggttatccgtgagtgaaatctcaagctggttatcgtttttattgttggaataccacagcattgcccagtatggtccgtcatatcctgtcaccatcctgtccgcgctgttggttaccttaaggttcttgtcgttgatcagtgtctggatatctaccgctgtaacctcaaacgtcttggtaacaacgcctgtatagttgccgcttccggtaatcgtcatcgtgtaggttccgatgtcttttaccgttgtcggtgaacatgccaccgtataatcggttccctttttcagtgtatgatctgtctttgatgcggaatgatatacaacactctctgtcggaagcgcaatctctgctcccgtatagtcaaacagctctctgtcaatgctggcagtaatcttcgtgcttgtaagattgcactgggcaatcgtatacgtcagacgtttcgttgtaccggtcttaaaattgctgttggaatcgctcggcgcaatctcaacgctcgccgtacctgcaaatatcttggtatccgcagaataggtcagcttgtagtccgactccggaagtgttaccatgtccgcgccctgcgcaaactttacaaccaccttcggcttcacgtctgctccgtccggagaatattccatcttatagtttgcagtgcttacctcggagccatcggcatccacatagtagcataccgcctttgacatgtccgcctgctcgattgtgaatttaccggtcactgcaccgccgtatgttcccataccctgcagcgtaatggttgctgttcctgcattcgtgttgcttgcgtaagtaacggagtaatccgttccctcaaccagtcccagatcgttgttgccgctcttccaggtaatgtccggttccggtgtctgtgcattgccgttataagttacagccgctgccgtcactttctggatcaggtctgagagatcagcgcctgccgcctgatactccaccgtgtaggttccctgatagtttccgataccggtgatgacacggcggtaggttccgtttccggcattgataatatctgttccgacggtgtaatccgtccccttctccagcgtcatgccgttgtaggttgcagtgatgaccggctccttgtccgctcctcctgccgcagcagccgtcacagacacagccatgccaacttcttcctgatccttgttgccaatatcttttgccttgatctcaaaatttaccgtctttgttccgtaaagagaattctttccggtaatcgtcaatgtggcctgtccgacattgacattgtcagaatataccgcatcgtaatccgcctgagaaatggtctccccgtccaccagaagctggaatgccggcgtccactcacttccggtatatacataggaagtcttgtcaaaaacaacattcgcgtccgccgcatttcgcggtgcaccgcaatatctctctccggtatagttgccggtaccggtcagtgtaattcctcttcctgtcttgctgagggaaatcgtgtaatctgttccttcaaccagattcttcacgccgtctacggcatccgcatctgcacgcgccgtatcctttacctcttggatgcaggaggtaagtgtggcagaagcgttgtccggatctgctgccgcatcagccagcaccttatcccagtcaatattgtcctgcagtgtcacttccactgccgcgtctgatatatccttctgtgcgatcacgtattccttctgaatctttccgctgtaaccgttctgtcctgtaatgtacaagtaataggttcccgcattcacaagcgcggttgtgtccgtggcaggatcaaacgttgctgccgcgccaccaaccatctgtgcataggaaagctggtactgatcgttctcttttaatatggtatctcccacctgtaccgcaacggatggaatctgctgtccgccgttgtataccggattctccgggctgactgtcaccgcatcctctgagagattcggtgtgactgtcaaattacaggtgtagctctctccggcataggctgccgtgatcgtcgtacttcctgcggcaataccctcaatggttgccgggttacctgtactgcttacttttgccaccgcttcattgccggaaacctacgttaccgttcccgtggcattctgcagtgtgagatcctgatccgtccagccctcgccgatggtcatgctgttcttgttcagtgctacagcggcactctgcttcacattgctgctctgcagcgccgcctgatcagccgcattggaagaacttctcccggatgttgcagtcacatcataggtatatgctattaccgccgcacagcttccgttcgctgtatacatatcctgccagccggcattgccgagaatatagctctctccctctgccgtaccgccatatacataaaaggacgccccgctcaaccggacgatcacagaaaacctggaaccattctccattacctgattcgccagccctgcggaataagtattctttccttccttcacgctgacttctttttggaaaatgctcgttcccgcatccggcgccatgccttctacatccttgtaatattccacggtagccgttgccttgctgccgtcatccacatgtgcgtagaagtcaatactgtctaacagttctgctccgtccgcattgcggttcgctgtaaataccgcagctacagcctgggcctcgcacggcgctcccgccagtaccccgtctccgttccgataggtgtttaccgttccctgtcctgcccagacagtcgtcggccattccaccatcgtcacaatcaggcatactgtcagcataaacgccgaaattctcttgcatacatccttgtacatacgcgccatctcctttgatctatccctttagcgttcgtcccattttatgaaactctaaattataccttatctattttatcgacatcttttcacggttctttaacatcttttcaaaaaaaacgaggcagccatacattatctggccgccccattctgtaatgcagatataatctgcgctttattcttctgtatcctcggactcttccggcacattctcctctaatgcgtaattctcatctaccacatcagtgtcatcaaaatcgtcgaaatcatcgaatgcaatctcctcgttctcatcaatatccgagctcagcttgatattgcggtatctcttcataccggtaccagccggaatcagcttaccaatgataacgttctccttcataccaatgagcggatcaaccttacccttgatggcagcttccgtcagaacctttgtggtctcctggaaggatgctgctgacaggaaggagttggttgcaagagaagcctttgtgataccaagcagtacctgcttgccttctgcaagctccttgccctctttctccaaaagctcatttgtatcctcgaagtcaagcgtatctactaatgttcccggaagcatgtcggaatctccgtttgtctccacgcggactttctgcagcatctggcgcacgatcacctcgatatgcttatcgttgatctcaacaccctgcagacggtatacacgctgtacttcgcgaagcatgtaatcctgaacggcacgtacacccttgatctttaagatatcatgcgggttgacagaaccttcggtcagctcgtcgccggcctctaagactgcaccgtccataaccttgattctggaaccgtaaggaatcagatatgccttgctctctccagtctcattgttcgtcacaacgatctcacgcttcttcttggtatctttgatattggcaacaccgctgaactcggtaatgatcgcaagtcccttcggctttcttgcctcaaaaatttcctcgacacgcggaagaccctgtgtaatatcggtaccggcaacaccacccgtatggaatgtacgcatggtaagctgtgtaccaggctcaccgatggactgtgccgcgatgataccgattgcctcaccaacctgtaccgcctgaccggttgccatgttggcgccgtagcacttcgcacacacacccatgtgggaacggcaggataatacggtacggatcttcacctttgtaagcggttctccgttctcatccacacccttgctcataacaagtgctgcgcgcttcggtgtaatcatatgatttgccttcacgaggacattgccctcggcatcacagatggtattgcaggagaaacgtcctgtaatacgctcctgaaggctctcgatctcttccttgccatccatgaatgcagttacccacataccagggatctctctgcctgttccctcacagcagtcagactcacgaacgatcatatgctgtgatacatctaccagacgtctggtcaggtatccggaatcggcggtacgaagagcggtatcggacataccttttcgcgctccatgcgcagacatgaagtattccagtacgtcaagaccttcacggaagttggacttgattggcagctcgattgttctaccggttgtatctgccataagtcctcgcataccagcaagctgtttgatctgcttatcggaaccacgggctccggaatccgccatcatgaagatattgttgtacttatccagtccggagagaagtgcatgtgtcagctgctcatccgtctctttccatgtctctacgacttccttgtaacgctcttcctctgtgataagaccacgcttatactgctttgtaatgcggtctacggtatcctgggcgtccttgatcatctgtggcttttccggcggctcggtcatatcggaaatggatacggtcattgccgccctggtggagtatttgtaacccatcgccttaacagcatccagcacctcggcagttctggttgcgccgtgaatattgatgactttctcaaggatctgcttattctgcttctttgctacgaggaaatcgacctcgagctttaattcattgcccggaatgcttctgtctacaaagcccagatcctgcgggataatctcgttgaagatgaaacgtcccagcgtggactctacgattccggtaatcttttttccatccggcatggtcttgctcatgcggactttgattctggagtgaagtgttaccgcgccattctcataggcgaggattgcttcgttgacactcttgaagaatttgccttctccctttgcgcccggtctctcctgtgtcaggtagtaaataccaagcaccatatcctgtgaaggaacggctaccagcccaccgtcagacggctttaacaggttgttcggagagagcagcatgaaacggcactctgcctgtgcttccacagaaagcggaaggtgaacagccatctggtcaccatcgaaatcggcgttgaacgcggtacacacaagcggatgaagcttgattgccttaccctctacgaggatcggctcgaatgcctgaataccgagacggtgcagtgtaggagcacggttcagcataaccggatgctctttgatgacgtcctcgagcacatcccagacctcagtctgaagtctctcgaccatcttcttcgcactcttgatattatgagcggttccgtttgcaacgagctccttcataacgaacggcttgaacagctcgattgccatttccttcggaagaccacactggtaaatctttaacttcggctctacgcagataacggaacgtccggaatagtcaacacgcttaccaagcaggttctgacggaaacgtccggacttaccttttaacatgtcagacagagacttgagtgctctgttacccggtcctgtaacaggacgtccgcggcggccgttatcgatcagggcatctacagcctcctgaagcatacgcttctcgttgcggacgatgatatccggtgcgccaagctctaagagtcttctcagacggttgttacggttgatgattcttctgtacagatcgtttaagtcagatgttgcaaaacgtccgccatccagctgtaccatcgggcgcagatctggcggaataaccgggatgaccgtgaggatcatccactccggcttgttgccggactctcggaatgcttctacaacttccagtctcttgatgatgcgcgcgcgcttctgaccggttgcgtctgcaagctctgcctgaagctctgcggaatccttctcaagatcgatcgcgtgtaacagttcctggattgcctcggcacccattccgacacggaacgcattgccgtactgctctctggcttcctgatattcgctctcggaaagcacctgcttatactgtaatgccgtgttaccggcatccagtacaatgtatgatgcaaaatataataccttctcaagagttctcggagagaggtcaagaatcagtcccatgcgggacggaattcccttaaagtaccagatatgggaaaccggagctgcaagctcgatatgtcccatacgctctctacgaacgcttgcttttgtaatctcaacgccgcatcggtcacataccacacctttgtagcggatcttcttgtatttaccacagtggcattcccagtccttgctcggtccgaaaatcttttcacagaacagaccatccttctcaggctttaatgttctgtagttgatcgtctcaggcttcttaacctcgcctctggaccactcatgaatcttctccggtgatgccaaaccgatcttaatggcatcgaaagagatagactggcctgttgcctctttattcattgtctctggcatttatgacactcccttctatctattcttcctcaagaacgtcgtctgatgactcatcaaaaaactcagaatcgtcttcatcctcttcctcatcttctacgtctaccagttcctcgttctctgtatcaaactgcttctgggagaatcccatctttgcaaaggactcgctgtcttcaaatgcaaaatccttatcgccggaaatgatagaatttaaatcggtattaccgtactcactggtctccatgagttctacttcgttgcggttctcatcgagcactttgacatccagtccgagggactgcagctcttttaagagaaccttgaaggactccggaatacccggctcagggatattgtcacccttgatgatcgcctcgtaagtcttcacacgtccgaccacgtcatcggacttcactgtcaggatctcctgtaaggtataagatgcaccgtaagcctcgagtgcccatacctccatctctccgaaacgctgtccaccgaactgtgccttaccacctaacggctgctgcgttactaaggagtaaggaccggtagaacgcgcatggatcttatcgtctaccaggtgatgcagcttcaggtaatgcatgtgtccgattgtaaccggtgaatcaaacggctctccggtacgtccgtcacgaagctgtacctttccgtcacgggaaatcggcacgcccttccacagtgccctgtgtgcgcggttgtcatacaggtacttcatgacttcctcgttcagtgtgtctttatattttgcttcaaagtcttcccactcgaagttgacgtaatcattggcaagctccagcgtatcctggatatcaatctccttcgcaccgtcgaataccggtgtctcgatgttgaagccaagtgccttcgcagcaaggcttaagtgaatctcgaggacctgaccgatgttcatacgggacggcacacccaacgggttcagcacgatgtcaagtgggcgaccattcggaaggaacggcatatcctctaccggaagtacacgggaaacgacacccttgttaccgtgacgacctgccatcttatcaccgacggagatctttctcttctgtgcaatgtaaatgcggactgcctgattcacgcccggagacagctcgtcgccgttctctcttgtgaatacctttgcatccacgatgataccgtactcgccgtgcggcaccttcaaggaagtgtcacgcacttctcttgccttctcgccgaagattgcgcggagcagcctctcctcggctgtcagctcagtctctcccttcggagttacctttccgactaagatatcaccggcgcgaacctccgcaccgatacggataatacctctctcatcgagatccttcaacgcgtcgtcgccgacacccggaacatctctcgtgatctcttccggtccgagcttcgtgtcacgcgcttctgcttcatactcctcaatatggatagatgtataaacatcatcctgtaccagacgctcgctcaaaagaacggcatcctcgtagttgtaaccttcccaggtcatgaatccgatcagcgggttcttaccgagtgccaactcaccgtttgcggtggaaggaccatctgcgatcacttcgccaacctccacgcggtcgcccttaaacacgatcggcttctggttgtagcagttggactggttacttctggagaacttcgtcagcttgtatatatctctgccgccctcgtcattcttgatgatgatctggttggactcagagctctcaacaacaccggcttttttcgccacaacacacacaccggagtctaccgctgccttcgtctccataccggtaccgactaccggcgcctctgtggtcagaagcggcactgcctgacgctgcatgttggatcccatgagtgcacggtttgcatcgtcgttctgcaggaacggaatggatgcggtagcgacggaaaacaccatcttcggggagacgtccatgtaatcaaacatggtcttctcatattcctgtgtctcatccagataacgaccggatacggaattacggacgaaatgtccttcctcatccagcgcctcattcgcctgtgctacatggtagttatcctcttcgtctgcggtcatgtagacaacttcgtctgtgacacgcggattcttaggatcggatttatcgatcttacggtacggagcctcaataaatccgtactcgttgattcttgcatagcttgccagagagttgatcagaccgatgttcggtccctcaggcgtctcgatcgggcacattcttccatagtgggagtaatgtacatctcgcacctcgaatcctgcacggtctctggacagaccgcccggtcccaatgcggaaagacgtctcttgtgtgtcagctctgacagcgggttgttctgatccataaactgggacagctgggaagatccgaagaactcttttacagctgcggttaccggcttaatgttgatcaggctctgcggggaaataccgtccagatccagggtggtcattctctcacgaaccactctctccagtctggaaagaccgatacggtactggttctgtaacagttctccgaccgcacggatacgtctattgcccagatgatcgatatcgtcatcatgaccaatgccgtactctaaatgcatgttatagttgatggacgcaaaaatatcatccttggtgatatgcttcggaatcaggtcatgcacattcttgtgaatggcctcttttaaatcctccacgtccggatattcatccatgagctgctttaataccggatagtacacgagctctgtgatgccgagatccttcgggttgcagtccacataatgtctcagatctaccatcatggaagacagcaccttgatatttctggtctcgccctgaatccatacatacggaacagccgcgttctgaatatcatccgccagggatcttgtcacttcggttcctgcctcggcgatgatctcacctgtggacacatcgacaacatcctctgccagaacatgtccgttgatacggttgcgcaacattaacttcttattaaacttatagcgtccgacctttgcaagatcatatcttctcgggtcaaaaaacatagcagaaataaggctctccgcactctcaactgtcagcggctcgcctggtctgattttcttatataattccagaagtccctcttcgtagttggttgccacgtccttgccgaaacttgcaagaatcttcggctcctcaccgaacaggtctacgatctcctggttgcttccgacgccaagtgcacggatcaataccgtgatcggcacctttctggttctatctacacggacataaaatacgtcattggagtctgtctcatactctaaccacgcaccacggttagggatgacagtacaggaatacagctttttacccactttatcgtgagcgattccatagtagatacccggggaacgtaccagctggctgacgataacacgctctgcgccgttgatcacgaaagtaccggtctctgtcatcaaaggaaggtcgcccatgaaaatctcatgctcattgatctcgtcagtctccttgttgtgaagtctgaccttgaccttcaaaggtgccgcataagttgcatctctttctttgcactccggaattgtgtactttacatcgtcctcacacaatgtaaaatctacaaactccaggctcagatgaccgctgtaatcagcgattggagagatatcatcgaaaacttctttcaggccctcgcttaagaaccactgataggagtctttctggacttctatcagattcggcatttccaatacctctttctgtctcgagtaactcatacgtatgccctttccagctttcactggacgtattctgtttttctccattgacgtttcacctctcgtttttatttacactaagctgccccaaaagtggcagcaactgtctcaatccaccgtaaccacaagatacggtataggcacatccggcggcatacaacgcgaaaagcgcgcaataagcccaatgcaccacaatagtgcaacgtatatgatagcacaatagcaagtgccgcgtcaaggattttttaaaatatttatttcttctccgtgagtacgcaaaaaacgacgaaggaaagctctaaagccttcgctccgccgttcgctaccgcttatgagacaagaaaatttgccgccgcgcgggttctctgttccatctgttttttctgcataaaaaatgcatattgctgcagggtctgcttctttttctgttcggataccgcctgtccgtaatccagatcctcgagccggctttttcctgccgttacattcagcctggtgttggtactgtagcggtatgcatactccagtgcattgctctgtgcgcccataccgctgcgccctgcactcactctggcaagtgcatcatccacctgcgtcagatcaaaatcgttcgtcacatcaaaatccgcaatcccaagtgcctgtaatgtggcatctgcagtcgtaatcttcattccgttgccggtggcatccgtcatgatattgtacttctgcgacgtgccatccagaagcggcttcgtgttaaagcttgtctgttttgcaatatctgaaatgccctgcttatactgctcgatctgcgcctgaatacttgtccgctccgcatctgtgatcgtcaccgtattggacgcccgaacaccaagttcacggatcttctgaagataatccgtaatcccgctcattgcgccatccgccacattcagcatatcttttgccgcgccaatgttgttctccccgaccttatagcttctggtctgcgtctcctgcttctggatgatcgcaagctccgccgcaccgtctgccgcccggttcacttttttgccgcttgcaaatttcccgtaatctgcataagatgtgctgcttcgctgcatcgaagtaataccgttcataaaagcctcctttctgttctcaagttccgctgctcttcctgtccgccttttctattttctttataacacacaataccgctactcttcaagtatctcctgaatgtaataccggctttgttttgcgagatcgacaaaagtgtcccccacctgcacaagcggacatgacagcttatatttgttaatcatgaccactcttcccatcctgccatcattcaggatcacgttgcgctggatcatcgtctcggcaatccgcttcagaaatgtcatcagatagttggcgtccagacggttatacccctcatcctccatcttcttgatcgcttcaaatgccgagatgcccgctttatctccctgacgcatcgtaagggcatcgtaagtatctgccaccgcaagaattctggaaatccagttgatgttatcccccattacctgcagtgggaacccgcttccattcacgcgctcgtggtgcgtcagaaccgcctgtttaatccgctggtctatgttcatcttcttaataaggttgtatccgctcacgacatgtttctcatatcgttccgtctcgtattcttgcagaaattccgtctgttcctgcccgtccttccagagttcaagaaatccaatgtcatgaagcagccccgccgccatgacctcctccatctccgcctcggcgcatccgctccaccgtgcaagaagctgtccaaaaagcgccacgttaatggtatgtgcgtacagacctgactgctgttttttcatatgaagcagcatgtccgcaagatctgtatcatcatctgcttttttcagcagtccgttcagcggctccagcagcatggaaatgttcacatccttactccggtatacaatatctttcagttcttccgaaatcgactgttcggcaaccgagaactctgcccggaactctttcagatgctgttccttcgccggcgcactctgttcctgctgttccgggcgttctttcctgcccgtcggatattccaccatcacactgtccacaaaatgtctggtcagcagcgcgacgacgtccttcgtgacgaccgctccgtccggcacaatcaccgcccctgtctttgaaaacacatcctcttttatcatcattccctcccgcaggcggttgaccgacatcctcaaacacggcatggtatcttctcctctttcccgtactttcatcctctggaaaagtactattttcctataaagtctgttagtactatcatataccaagtgttttcttttgggaagtagggaatttattttcccgtaccggctgtcgccgcatataagcaaaaacggcgcgaccgccgggaataaattcccgtagtcacgccgtttccgcttatatgcttctcgtagcttacgcgattattttaaagtaacctttgcgccctcagcctcaagtttagccttgatgtcgtcagcggttgccttgtcagcagcctctttgagaaccttcggagctccatcaacgagatccttagcttcctttaagcctaagccagttgcctcacgaacaaccttgataaccttaaccttgttcggaccaacctctgttaactcaacgtcgaactcagtcttctcttctgctgctgcgccgtcaccagcacctgctgctgcaactacaacgcctgctgctgcagatacgccgaactcttcctcacaagcctttactaagtcgtttaactctaatacgcttaactctttgatagcatcaataaattctgctgttgtcatctttgccatgattattttcctccatttaatattgagattgtatcacgatgatacgttttctgcctgcagatccctgcggcttttttcactacattcgatccggattattctgccggagtctctgctgcttctgctgcaggagcttcctctgccggagcagcctctactgccgcgtcagctgcaccgcccttttctgcgatctgattaagaacgcgggcaaggttggtaatcggagactgtaagcttccaagtaacttggaaagaagaacttctcttgacggaatcgaagagattgccttcatgcctgcctcatcatagaagttaccctcaactacgcctgcttttacttcaagagccggagctttcttagcgaaatctgccaatactcttgccggagctgttgcgtctgtcgtagaaattgcgaatgcattcggtccctcaagaacgtctcttaagctctcgaactgtgttccctctacggcacggcttactaatgtgttcttatatactttataagtaacaccagcttctcttaatgctttacgtaactgagtatcctctgcaacggtaagtccgcggtaatcaacgactacaacagactgcgcatctttgatgttttcagaaatttcctgtacgataggctgttttaattctacctttgccacgaatcgtgcacctcctttttagattttacgcatataacaaatccgaaaggatataaaaatccctctctgcctggacagagagggatcagaatctcattctcaatgattgctcatgaaagtccctcggcaggctctatgattacgccttacggcacctgctgtcttcggccattatatgcaatccacatacgtggatccgccactgctgtggcatccgtctcatgcgagacgactgcatccatacggacgcaccgcgttacaacgcctttgcattataacactgtatattgcggctgtcaacacttttcgccaacaacacaaactaatttgtgatcttggttacatttaacttaacgccaggtcccatggtagatgtaagagttgcgctctttacatactgaccttttaagctggacggcttagccttgttgatagcacccataagggtctggaagttgtcgcttaactgctcctcagtgaaagaagcttttcctactggcacgtggataatgttggtcttgtccaatctgtactcaatcttaccagctttgatgtcgttgatagccttggtaacatccattgtaacagttccagccttcgggtttggcattaagcccttcggtccaagtacacgaccgagacgtccaacaacgcccatcatgtcaggtgtagcaacgatcacatcaaagtctaaccaaccctcgttctggatcttcggaactaactcctcgcctccaacgtagtcagcgcctgctgcctgtgcctcatctaactttacgccctttgcgaatactaaaacttttacagtcttacctgttccgtgcggcagtacaactgcgccacggatctgctgctctgcatgacgtccatcacaaccggtcttgatatgaagctcgattgtctcatcaaacttcgctgtagcgttcttttttactaagctgattgcctcagcaacatcgtactgattcgccttgtcaaaagactttacagcgtcctgatatttctttcctcttttcatgaatataaacctcctggtggtagtatcgggagaggaccctcccactatatcgttccataagaacaccgccggtgctctctgatgcattacactctcgtgtcttactgctctacgttaacgcccatacttcttgcagttcctgcgatcatgctcatagctgcctctaaggatgctgcgtttaagtctggcatctttaactctgcgatctcctgtaattttgccttggagagagttgcaaccttatccttgttcggtgtggaagaaccggacttgatgttgcaagccttcttgatcagtaccggagcaggcggagtctttgtaacgaagctgaagcttctgtctgcgtatacagtgattactacagggatgattaaatcgccctgatccgctgttctggcgttgaactgctttgtaaactcaacaatgttcacaccgtgctgtccaagtgcaggtccgactggaggagctggtgtagccttgccagcaggaatctgcaatttgatatatccttctactttctttgccattggaattgcctccttaattcattctttcctgattaggattgctcgcttaatttgcaagctttacatctgcgaaacttatttctaccggcgtttcgcggccgaaaagctcaacattgatggtcacgctctgcttgccaggattcatcgcctgaatcacgccgatggtatctttccagactcctccggtgacaactacggtgtctccctcagcaaaatcaacctcaatgttctctgtcttgatcccaagcggtctcatttccatatcggtaagcggtaccggcttcgatcccggaccaacaaatccggtaacaccacgggtatttctgacaacgtaccaagtgtcatcattcataaccatattgataagcacgtatcccggaaacatcttctttgatacggatttctttgcgccgttcttcagctcaacgacctcctgcatcggtacgcggacctctaagatctggtcttccagatgccggttctcaattgtcttgtcaatgttcgcttttaccttattctcatatcctgagtaggtatgaactacataccagtgtgcctctgccataaatcacctatgcctccattaaaaacttaaaccaacaaggaaatcaacgccatactgaatcacaaaatccagaagcgcgatcacaagacccattactacggaaacagcaacaacggctgctgtctgtcttgcaagtgatttgttgtccggccaaatgatctttttgaattcagccgacaggccgctaaaaaagctctctttctgagcagctttgttctcggtttctcccattttctcactcctttgcccaaaagcctatttggtttccttgtgtaatgtatgagtcttgcagaatctacaatacttcttggtttccattctgtctggatgagctttcttgtcctttgtcgtgttgtaattacgattcttacactcagtacatgccaatgttattttcgtgcgcacaacttccacctccattaaaattctttgtgcttttcttatgtcttttgttccctgcgaccgggcttaggttcccctcaggaaaggagtcctaaaaaaaggcataaaaaaaagacctacttccatcgctagtctaatatatcacaatcaatatggagcgtcaaccacttttttaaactcgtgcaacgaatttattttagcactacatatagtgtgccgcaagtcttttttctgattttacaaatctatggcgtaatttttatttttactgtaaatattttatatctatttaccgataaaaattattagaagtatatctattgtgcatttaaaaatacagtttcattatatataagcaggaagcaatataaacggatttatatccctgcatatgcgaaggcatatgatttcatggaagaaaggagggattccaatggcagtcatcgacagtgcctatcagtattacctgagcacttatgccggttccggcatgtctcgctacgacacgcacaaaaaaagccagctgcgcgccgtatacaataatattgtcaaagttaataaagattcccccctttacaaaatcaatttcaccagggataccggccgttttgccatcgacatcaaggagcaggcccgctcgatcgagaattttatcgcagcgctttcaaacaatgctccggacgacaatgcggaacacgctttttcccggaaaatcgcgcagtcttctgatgaggacgctgtgagtgtgcagtacatcggctcgaacatggacgcggacaactccaagcagttcgatataacggtagaacgtctcgccacaccgcaggtcaaccgcggcgtgtatcttgccccgggcgcaagtgactttgtgccaggcaattacagcttcgacctgaacaccaacttaagctcttatgaattccagtacacgatcagcggcagggacaccaacgagaccgtgcagcgcaagatcatgcggctgatcaataatgccaatatcggcttaaacgccacactggtctccaacgaccgcggacagaatgcgctttccatcacgtcgcagcagaccggtctcggcgatagcgagcagtacctgtttgagattatgccggcgccggacagtggttccatacgcgccatgcgcacgctcggcatcaacgacgtcacggaaatgccggtcaattcgctctttttgttaaacggtaccgaacattcgtcgctgtccaacacatttactgtcaacaacgcttttgaactgacgctgaaagcccccagtgccgacggggaatccgcaacgatcggcttcaaagcggatacggatgcggtcgcagacaatgtgcagtcgctggtcaacgtctacaacaacatgatccagctcggtcacaattaccacggcagtcaggagtccggcaagcttctccacgatatggagagcgttgcaaagtcctatttcaacgagttggaatccatcgggctgaatctgcagcaggacggatcgatccagattgacaagaacctgttaaccgacgccgtttccgcaccggacgcacgcgaaagttttcgtaccctgaacaatttcaaaaacggtcttcaacgcaaagccacccaggcttccatcgacccgatcagctatgtcagcaaagtcctgattgcctacaagaatccggggcacaattttgcggcggcttatcactcttcggtgtattccggtctgatgcttgatacctattgttaaaggaaattgccgcaatacgcgtaggcctctttggggtgataagtaatattacagaaataccagagaacaaaaaagttccagaataaacagacggcggcaaatctttgaagcaaaattcacgtattgcttccatgccgtggctggcatcccattccgtatcttggccacgtttggacactcacggagtgtgtccgacaagccgcagacaatgagcggactttctggtgtccctaatggctagccttatccgccttttattataataaaaataagcatgcggatacatacataatgtatctacatgcttatagtacaagcagcgctagcaacgcttcttcacagacaatataaaaccgcgcgaaccgaaactcgttggcatctgctattgaaaataaggcagatgccaattcaaacatcggcttcgcgcggttatgttttattcagaagcgcagacaagcgctgcacaaaagtcctaaaattgtctgcggattgcggacactctccgcggagtgttcaaagcttggaaaaacacggatcatcggaggtaccaaacgcggtatagattagaaataccccattttgcgtttcagattcccgccgccggttggcagtccgggacaggcatgtacaggctgtctgtaaaaacttctgcctgccacattccatgcccggtcttttagcgtctccactcgcggggcgtcatgcccgtgatgcggcggaagagccgtgtgaaatagtggacgtcggggatgccgcaggctgccgcaacatcctgcaccggcaggagggtactgcgcagcagcttcttggcgtattcgatgcggttggcgttgacgtagtccgtcagcgtcatgccgacttcctttttgaacagcgtggacaggtagcttgtattcaaaaacagctcgctggcaaaacgtttcaggcttaagtccccggtcagcgaggcgtctatggtgacgagaatctggcggatcggatcggaatacgaactcatgcttcgctgttccacgagctgacagtaactttgaaccatgtaggatatgagatcgttgatttcttccacggattggatgctctcgatcatgcgcgcaaagttgccggagacggcgtcgatataaaacgggtggacgcccgtttcgtacgcttttctccgcaacagcgtgttgagggtcagaatcaggttcttgcggttgcggagtgcgtcctccgtgcgggggacaaagcgcaggttcccgagagcctccatgaaggagagggcacgggcgctgttgccgtgagagatggcgtcgagcagctcatcctcgatatggtagcgctcttcaagaaggtgcatgcttaagaccgggtcctccggtacgacaaactggtgcttttccaaaaaggattctctggtctcgagatctttcaaatgcagggtctgtacggatacatccgcgtcggcatccagcgtctgatagacgtggcgcagcagggctgtcatggaggctttgtccgcgatcagcggcagggcgtgataatattcctgcagctgtggaaaaagttctgtcggaatatccagccggttcataagtgacagaatctgggagcgctcaaattctctccagagaaaaggcccgacgaacaggaaggcacttttatccggcagacggaaaaaggaataattgcattcgtagtaatcgacaataaaatagatggtgttctgtacaaatggaaatggcgcctgtttttgcgcatcggcttcctgcatcaggatactgttgcgcagtccgagatccagatctgccagttctaactgtttgcggtcggtcagtctgcactggatatgcaggtcagaaaaatatgcggtaagaaaagataaaatcggctgttccatcaagaacctcctgtccgggtcagtgtctgttgttttgattttggcacaatattttctgttatgcaaggaaaaacaaaaaaatgacaaggattattcatccctttaaagcatcggcttgcagaccggagcaatttatgataattctataacaacgtgttcacggtgaacacattttagaaaatagtgcagaatgcttgaaagagaggatacccatgaaaatcacagcttatgaagtgagaccggatgaaaaagattacctgcttgccgcagcacagcaggagcagatagagatcacactggtgcaggggccgatgacacaggacaacatcgatcgtgccgagggagcggacggcattacgattcttggagatacaaagatggacgccgcattgattgaggagaccgcaaagcggcgtatccgcgtcgttgcgacacgtaccatcgggtatgaccatattgacctgaatgcggcgaagagcaatggcgttcacgtctgcaacggctactacgatccggacggcgttgccgagtatacggtcatgctgattttaatgtcgcttcgcaattataagcaggcgctgttccgggggaatgccaacgattattcgcttggcgggttgatcggaagggagcttcgtaatcttaccgtcggtattatcggaacgggaaagatcggacagaaggtggcgcagaatctgcagggattcggctgcaggattctggcatacagcagacgtcagaatgccgatccggcgcttggaatcgaatactgttctctggaggaactgtacgcgaagagtgatattatctcactgcacacgccactgtccaatcagacacgttatatgattgataaaaaggcgatcgaccagatgaaggacggcgtcattctgatcaactgcgcgagaggagagttgatgcgcgtggatgacatcatcgagggaatcgagacgcggaagatcggtgcgctgggactggatgtgatcgagcatgaggagggaatctaccatatggaccgccggtcggatattcttgcaaaccggaatatggcgtatctgagacagttcccgaatgtgacgatgacgcagcacattgcgttttatacagaggaagcggtaaaaagcatggcggagagcggtattgtcaatgtggtgaaatgcctgaaaaaacaggataatcctaacctgatctgctaagttcatatacaaaaagagtctgccacaagaaaacttgtgacagactctttttaaatccattgtttgcaatatcttaatctaacaaataaaacaagtctattttaagaaaaaggtacatgaaactagtgatttaacgcggtaagcttaccgcctgcagtaattattttactacagttacgttggttgcctgcggtcccttggatccttctacaacgtcgaactctacggaagcgccctcttcaagagacttgaaaccttccatgttaagtcctgagtaatgtacgaatacatcgttgcctgactcgtcagaaatgaatccgtaacccttctggttgttgaaccattttactgtacctttcatcaaaaagtacctccaaaaataatactaactgtaacttacagctattagtacaatatcataagaatttataaaagtaaagtaataaattaaagttcttcaaaactaatttcatgcgcagtgagaaagcgctttacaagggaatcccactcctgatcgaggctcttgtcaacggagaaaatccggtacgaaatgcccgtggtaaggagcagttttttctgctggaatttcagattgataaacattcccgtaatgtcctccggggtaaaagaactgtgggtcgaaagcagtgtccgttccagattcttcggggagagcagaaagacaaatttaaaataagaaggagtgcgtttgcccttgatcaggtcaaaacattgcggacgtacctgttcaaacgggagaaaagaaagtcccgtcagtccgagcgcatcggcttcatctgatgaataaaaatcgggctggatcgtgccgtctaagctccaggtgacgctgcccaagatgacggcttcctttagaagaaagtgcccgaacgtgtccgtacacagcagtttattcataaaatctttaatttccggtagggaaagtgcaatcatagtcttctccgtgtcatatagtattggggcgcattgcctttgtgtagtataacacagattggggacaaatagaaagccgattgggaaggtttgcttcacaatatgatttctggtatgataggaagctgagagaacagccccggaaggggtcacagataaagaagaaaagaggacatagacatgaaagagacagaacttttatttgatttgctgaaaaaaggtgtgtcaccggtacaggcagtctgcgcctgcaaagagcgcctggagagcgcgggatttctggaactgccctatgatgagccgtggaagctgcagaaaaacggaagatattatgtaaatcatcatgacaccacactgttcgcgtttacggtgggagaaggatggcaggagacaaagacgccacagattcggatggcggcagcgcatacggattttccgtgcctgcgcatcaagccgtcggcggatgtgacggcatgcggttacgcgcaggtgaatgtggaagtatacgggggcgcgatcttaaatacctggctggatcgtccgctcggtattgccggccgtgtggcagtgcgcacacaggacgcgtttgccccgaagattgtggagtttgtatcggaaaaaaatcttctgaccattccgaatctggcgatccacatgaaccgcgaggtcaacaagggtgtggagctgaaccgccagacggatatgctgccggtctttgcgctgctgccggaggaggagaaaaaagcggattatttccttacgtttctggcagacgagctgtctgtggaaaagactgacattctggattttgaactgaccgtatactgtaaggaaaatccggaattcatcggtctcaacgatgattttatctcaagtccgcgcctggataacctgacttcctgcgcggcgctcatctccggtctgatggatgccaggcggatggagggaatcaacctgatcgcactgtttgaccacgaggagatcggaagccatacgaagcagggcgctggttcgattctgctgcatgacatgctgcgccgcatcttaaaagagctgggacgggaacagacggcggagcaggatctctaccgcagcatgctgctgtccgtggatgtggcacacggcatccatccgaaccaggcagggaaaatggatcttaccaacaagcccgtgctcggaaggggattctgtatcaaggaggcaagttcgcagtcttatgcgacggactgcgaggcgattgccatcatccagcagatctgtgagaaagagaagatcgcgtaccagaagtttgtgaatcgttcggatatgccggggggaagtacgcttggatcgatcgcttccgcgcttcttccggtgaagaccgtggacatcggaatcccgcttcttgccatgcattccgcgcgggagctgatgggcagcgctgaccagcaggcgttaaaggatcttgtgaccgcatattttacactcgcttcgtgagaaagaatgcttcgtaagatataatttagataaagtttagaaattacctctatacaaaaaatggtttttgtgttaatgtaacatagtattgaatactacatgcgatagaaacgaaaaatatattaacggtttattgataacattaaacacatgccatagaacaggtggagggattgccatgtataagattgttgtggacagctgcggggaattaccggaggaactgaagaaggacggacattttgagacggtgtccttagaacttgaggtggacggttaccgcattaaggatgatgagacatttaaccagcttgattttctgcgccgggtgaagaagagcatcacgggaccgaagtcctcctgcccgtcaccggagcagtatatgcaggcgtatgagggagaggcagagcatgtatatgtggtgacgctttccgggaagctgagcggttcctacaacagtgcagagcttggcaggaacctctacgaggaggaacatccgggagagaacaagcagatctatgtatttaactccaggtctgcatcgatcggggagacgattatcggtcttaaggttcaggagttcgaggaggcaggtcttccgtttgaggaggtcgttgccagaacggaggagtatatcaattccatgaatacttattttgtcttagagacgttagagactctgcgcaagaacggaagactgaccaatctgaaagcgctgattgccaatacgctcaatatcaagccggtgatgggttccacaaaggagggcatgatctgccagctcggtcaggcgcgcggaatgaacaaggcacttgagaaaatggtgcaggatatgatcgggcgcacgaaggactgcgaacagcgtgtgcttgccatcgcgcactgcaactgcccggagcgcgccgcagcggtaaaagcccgcatagaaaagcttgcaaatttcaagaaaatcattatcataaatactgccggtgtcagcagtatgtatgcaaatgatggcggcgtaatcatggcagtgtaagacacgcgggtgtgtcgctgctgcccggagaggaacgcgggacacagatgacatatgaagaagtagtagatcagatcaatcagatcagaagattcgggaatcttgccggagtggaggttgccgggcgcatgttaaaggcgcttggcagtccgcaggcggggattccgttgatacacatagcagggacgaacggaaaaggttctgtctctgcttttctctgcgcaattttaagggaggcgggacttcgcgtcgggatgtttacctccccgcaccttgtggactttcgggaacgcatccagataaacggggaaatgatctctaaggaggatacgcagaggatcggcgtgcagcttcttgcgatggattttggcgtgcagccgacgatgtttgacgttacacttgccatggcaatcctctattttaaggaacaacgatgcgatgtcatgatcttagagaccggacttggcgggaggctggacgcaaccaatgccgtaggtgtgccggatgtaaccgtgatcacaaagatcggctatgaccacatggcggtgcttggaaatacgcttgctgagattgctgcggaaaagacgggcatcatcaaaaaaggcacctcgcttgtgcttgagagccaggaggcagaagtcatgacggtgtttgaggcgaaggtcagggaggaaggaattacagatttccggctgatcgaccctttggagataaaagagcagacttaccgcgacggcagacagtatttttcgtttggtgcctaccgtgatctgtccatgcgcatgcttggcgttcatcagtatgaaaatgccatcgcggcgcttctcggggcggaggcatttttcaggagacatacagagtggatctgcggcgggacaaaagagcgggaagagggcgtaaggcgcgcagtctgtcaggggatcgctaagaccgtatggaagggcaggatggaaatcctctcaaaaaaaccgttcctgctggtggacggcgcacacaacagcaacggcgtggaagcgttaagagagagcctcgtggcgcttttcccgggagaaaagtttcattttatcatgggcgtgatggcggataaggattatgagacaatgatcggggaattgttgccgcttgccattgattttacgacctgcacggtggagtgcgagcgggcgctgcaggcggacgccctggcggattgcatccggcggaaaggaattacagctgcatcagctgatgattttgcgtcctgttttcagagagggcggctcgatgaaacacatcgcacggttgcgtttggttcgctctatttcatcggtgagatcgaggcgctgtttgaggcaaaatagttacgaaaagattacagaatagagcgtttatgacaaaaatgatacaatttcacaaactttcagtaatagttcaccattttgtaatatttcgcctataatgaggtatagtaaatagggatacagtagatagaagtcagatagaaagagtctgtggaatgttatttagcagttttgagtttttatttcggtttttgccggtttttttagtgatatattatcttacaccgaaaaagttccgcaatgtcacattgctggggggaagtattgttttttatacaattggcgaggcgggttatattacgattctccttgcgtgtgttctggtcaattacacgctgacccgtttgatgtaccggaagaatacggacgggcggggaatcagacagaaacgcttattgcttcttgcgctcgggtatgatctgggcgtgctgtttttcttcaagtacagtggtctggcatccggactcccgcttggaatcagtttttacacgtttcagattatggcgtacgtgattgatgtgtaccgcggaagaattccggcagaacagtcgctgcttcggctgggaacgtatctgaccatgtttccgcagctgatatcgggaccgatcacaaattatgcggatgtgcgtgtagcattgggaagagagcgcacgatcaaggcacgtcagctggaagagggaatgaagctcttgattagcggacttgcagcaaaagtcgtgattgcggaccggatcggcacactctggaacagcatccggatgatcgggttcgacagcatctcaacaaagcttgcatggatgggagcgttcgcttactcactgcagctgtattttgacttcgcgggatattcgatgatggcgagaggaatcggaaagatgctgggatttgagctcccggtgaacttccgctatccctacatttcaaaatcagtcacggaattctggcgcagatggcatattacgctcggcagatggttcagggaatatgtatacattccgctgggaggcaaccggaagggaaaggcacgcacctttttcaatttgtttgtggtgtggagccttaccgcgttgtggcacggggcgaattataacttcctgatctggggcgggattctgctttgctgcctgcttgcagaaaagctctttctgctgcgcctgctggataaaagcagggtgattggtcatctttatgtattgtttgttgttccgctcagctgggtggcgtttgcggtcaccgatctgtcggagcttggcgtttatatgacgcggctgttcccgtttgcggggcacgcggcaggagtcatcaatcatctggattatataaaatatctgaatgactatgcaccgctgtttcttctgggcgtgctctttgcaacgccgcttccggagacctgctatcggctgatcgagcgcaaatggatcggcagggtgatactgctcggcatttttgggctttgcatgtactatctggcggtgtcggcaaacaatccgtttttgtactttaatttttaaatgtgtggtggatggatttgagaaagcttttgaaatgtccggtaacggtcgcactgcttatcttgtgggcggcgctgtcggttgtcggctatctggggaaagatacaatatataagaattatacggttgatatacgaacgacaccatacttcgtcctggtgtttgacggactgcatgacggaatttttccgtggagtcatgtgggtgcgccgggcggcataggagagaacggaaagctgccgtccatcctgttgccgggggagagtgtctctgatactgagcttgccggcgggacggagacggtcggagagacagagacggaagaggcgccgcacacgcgggaattctgtatggtggatgacgactggttcgacgacgcggtctttatcggggattcgagaactgtggggctgcgcgattacggcgggctggacaatgcgaccttttacgcatccacagggcttggaatctacgatatgtggacggaaaagttctgtgaggtggacggggagaagaccacgcttgaggatgcgctttccagacggcagtttggcaaaatttatttccagatcggcatcaatgagatgggaagaggaaccctggacggttttatggagcagtacgcgcagtcggttcagaaatttagagaactccagcccgatgcgatcatctatgtgcagggtatcatgcgggttgcaaaggccaagtccgactcagataagatttttaacaatcagggaatcaatgaacgcaatatgagaattgcggaacttgcggataatcagactattttttacattgatgtgaatgatgtcgtatgtgatgcagacggaaacttaagagcggatctcacgtttgacaatctgcatctgtacggctcgaaatacggaatctgggtggatttcctcaagacgaagggaattgcaccgtgaagtggttcttctgaaaagaaatgagaccctcgtctcttagatgacacagctcgttcgacatggcgctccggtctacggagagatagtcggcgagctgttgtctgttaaagggaatatcaaaagacgaacttccggatctgcgcgcctcgctcgacagataggagagaagcttttcacgggtggtccgcttggtcatgtgctctaatttctgtccgagctggaaattgcgctcggcgagaacggagagcagatttcttgtgagctggttgtggaattcacatgcgcgggagcagagcgtcatcatttttgagacgtttaagtagagcacagtggaattctgctcggcgtagaggctgacttccagcgcacagtttgtgcggatggcataagattctccgaagatgtctccggggcggcagcgggtcatcagatttgtgttgccccagaaatcctccttcatgacatccacacatccttctaacacgagaccgagagaatccagatggtcgccgtagtgaaagagaaagctgccctttggataggagagggtctttgccgacagacagtcgagcatggcatggatttcttcgggtgcaatatcataaaaaacgggagaagcctgcaagagggcatcgtatccttggaaagtttgcattatttttcgtcccttcgactttttgttgtaaaaacaacagaaatgttgacgctattgtagtatcctgtggaagaaaagtcaagagagaatttccggcatgcgtgccggagttagaatggaggatatgatgttacgaagagtcattgagattgaggaagaaaagtgcaacggctgcggagcatgtgcaaacgcctgccacgagggagccatcagtattgtaaacggcaaggccaagctgatgcgggacgattactgcgacggacttggcgactgtctgccgacctgtccgatggatgcgattcattttgtggagcgtgaggcggcggcttatgatgctgcggcagttgaggagaataagagaaagaaagcagcgcagcaggcgatagcgtcacagccgcttccgtgcggatgtccgggaacccaggcgaagacgatccgccatgagcagcaggcagtctgtccgaccgccgcagaagagagtgcggcagaacttacgtcggagctgacacagtggccggtgcagatcaagctggttccggtgcgcgccccgtattttgacggagcaaagcttctggtggctgcagactgtacagcgtatgcgtatgcgaatttccacaaaaaatatatccgcaatcacatcacgctgatcggatgtccgaagttagacgatgtggattattcggagaagctgacccagatcattgcgcagaacgatattaagagcattaccgtggttcgcatggaagtgccgtgctgcggaggaatcgagcaggcggtgaaaaatgcactcgcggcaagcggtaagatgattccgtggcaggtagacattatctctacggacggaagaattctcgagtaatactttccccttttgcgggacatactatgatgcagaagtatgttacgcgaaaggggattttttatggcacttactatgaaaattacagaggtacacgcgcgggagatcctggattcccgcggcaatccgaccgtggaggtggaggtgaccgccgagacggagacaacggggagaaagactacagcgcgggagtcggttccgtcgggagcgagcaccggaagatttgaggcagtggagcttcgggacggcgacagggagtatttcggactgggcacgaagaaggtggtggatcacgtcaacacaaagatccgggaagcgcttcttggaatgaatgttttggatcaggcacttatcgaccgcagaatggtcgagctggacgggacagacaacaaaggaaatcttggggcgaatgcgatcttaggcgtgtcgctcgcctgcgcgaagacggcggcagcggcactcgatatgccgctttaccgctatattggcggaggcaacgccaagcggctgccggttcccatgatgaatgtcataaacggcggagtccatgcgaagaattcactggattttcaggaatttatgatcctgcccattagcgccaaaagctatcgggaagcgctgcgcatgggcgcggaggtatatcatttcctgcgccagattttaaacgaggagggatatgctacggcggtcggcgatgaaggcggctttgcgccggatcttgcggatgccggtgaggtgttccggtatctgggaaaagcggtggaaaaggcgggctatacggtcggaaaagatgtggtctacgcaatggatgccgcagcgagtgaattatataatgaagagacgggaatgtaccatttcccgggggagaatggaatctgcagggatgcaaaggagatgatcgcgctctacgaagatctggcaaagcgttttccactggtgtcgatcgaggatggtctgcaggaagacgactgggagggctggcagagtctgaccgggcgtctgggagatggcatgcagcttgtcggcgatgacctgtttgtcacaaatcccaagcggatcaagtgcggcatcaaattaaatgcaggaaatgcggtgctgataaaggtgaatcagatcggcacgctgacggaggcgttggacgccatcgagatggcgcagtgtgccggctatcacacggtgatctcccaccgttccggggagacggaggatgcgtttatcgcggatcttgcggtcgcggtgaatgcggggcagatcaaaaccggcgcgccgtgcagggcggagcgcactgcaaagtataaccggcttctgcggattgaggaggagcttggcgagacggcgcagttttctccggcggagcctttcgggagagcgtaaaaaacagttgaaaacgcggggggagtatgctataatagttaaagttgtgagttgattaccgtaggagggaattattttggcaattttaaagacgattttaaccgttgttttcatactgatttgtttggcgttgacagtcattatcttattacaggaaggaaagtccgcaggactcggagcgatcgccggagcggcagatacgtactggggaaggaataagggacgttccatggaaggcagactggtgacgggaaccaagattctggttgcgctgttcatcatcattgccgctgtattgaatctgggaatcttttagaaatgaggctgtcgcatctgcggcagcttttttgctgcggagaggaaggatatgagagaagaacttttacaggaacgaaaaaaagcaatttacggactgatctgcgatgagctttatgtgccgatgaaggcgaaggagatcgcggcagtattaaatgtgccaaagagtgacagaagagacctcgcggaagtgctggatgcgcttgtggcggagggaaaagtggaagtgtcatcgaaaggcaagtacatgaagtcggaaggaaaattcctgacaggcgtttttatcgcgcatccgagaggatttggctttgtgacggtcgagggggaggatgaggatatttttattccggaatcccaggtaaacggtgcttttcacggcgataccgtgcaggtgacgctgacacgcgccgaggggcacggacggcgcagagaggggcagatcacaaagattttgacccgcggggtcagccggatcgtctgtacctatgaaaaaagcaagacattcgggttcgccgtgccggataatccgagattcggacaggatatttttatcccgcaggagcgctctaaaggtgcggtgagcggacataaggtcgtggtggaactgacggatttcggcggcaatggaaaaaagccggagggaaaggtcgtagagattctgggacatgtgaacgacccggggacggatattctctcgatcgtgcgaggttacgatctgccgaccgagttctcggagaagatcatgaatcaggtggagcgcgtggcaggtgaggtcagcacggccgatatggcaggccgcatggatctgcgggactggcagacggtgacgatcgacggagaggatgccaaggatttggacgatgccatcaccctgacgaaggagggggatgtctaccgcctgggcgttcatattgcggatgtcacgaattatgtgcaggagcgcagcgcccttgacgtggaggctctaaagcgcggcacatcggtctatctggtcgaccgtgtgattccgatgcttccgcatgcgctttccaacggcatctgttcgctgaacgccggggagaaccggctggcattaagctgtatcatgaccgtggatgcgaagggaaatgtgatcgatcacgtgattgcggagaccgtcattaaggtcgaccgccgcatgagttacaccagtgtcaaaaagatcctggaggatcacgatgaggcggagatccgcgcgtatgaggagcttgtgcccatgtttgagaggatgcgggatctggcggcgatcctccgcaaaaaacggatgaagcgcggatcgattgattttgatttcccggagacgaagatcattctggacgcgcagggacgccctgtggagatcaagccgtacgagcgcaatgttgcgaccaagattatcgaagattttatgctgcttgccaacgagacggtggcacaggattacttctggcaggaactgccgtttgtgtaccgtactcacgagaacccggatacggagaagatccacaagctggcaacgtttatcaataattttggctattcgattcatatcgggcaggatgaagtacacccgaaggaactccagaagctgctgcttcggattgacgggacgccggaggaggcgttaatcagccggctgacactccgctcgatgaagcaggcaaagtacagcaccgtaaacaccgggcatttcggactggcaacttcctattactgccatttcacctcgccgatccgccgttatccggatctgcagattcatcggatcatcaaggacaatctgcgcggaagaatgaatgcgaagcgcatcgagcattatgagaagattctgccggaggtggcaaagcattccagcgagatggagcgccgggcggatgaggcagagcgcgaatgtgacaagttaaagaaagtacagtacatgtccggacatctgggggaagagttctggggtgtcatttcgggcgtgaccgagtggggcttctatgtcgaactgccgaataccgtggagggacttgtgcatgtgacgacgctgacagacgactatttccactacagcgagagcacctatgagctgatcggggagaccaccgcaaagcgctacaagcttggtcagaaggtaaagattgtcgtggcagcgacagatccgtttatgcgaacgatcgactttcgtgtcgttaccggaacagaagacgaagaaaatgaaaaattaaaccagaagtttattgcagaataaaaatttgtggggtatactgtaacagcagtgcagatgaaaagcggcagtgcagacagtaagcgaaggaggatagtcgggatggcaaagaccgagaagaagttaatcgcgaataacaaaaaagcctaccatgactatttcctggaggagcggtttgaggcgggcattgaactgcacgggacggaagtgaagtccatgcgcatgggcaagtgctcgatcaaggaggcgtttgtgcgcatcgagaacggtgaagtcatcgtttacggcatgcacgtcagcccttatgagaagggcaacattttcaacaaagatccgctccgccccaagaagcttctgatgcacaagtcagagatccggaagctgacgggaaagcttgcagagcagggctacacgctggttccggtggaggtatatctgaagggaagcctcgtgaaggtggagattgcacttgccaaaggtaagaagctctacgacaagcggcaggacattgcgaagaaagacatgcgccgcgaggcagagcgtgatttcaaggtaaagaatctgtattagatttttatgtaataggaagtttcctattacacaaaaagccctccgggcaggatgcgcactcgcgcgaagaagaaatatgtcgcaggcgaccgcgctcggcgcgagaatgtgctgtgacacattcttttaaataacaggggccagtaaaggtttcgacggggaatatgaagctggagaagcgagccgcacgggatgcgtcaaattccacaattaaatttaaacgctgaagataatttagcatacgctgcctaatggcagcagtctgacctagagcactcacactttaggacccaggcttcgacgatgtgagaaacgacacaggcaaagctttgagcctgcgggcgtaccatgaagctaccaaaaccgtaagggtgtctgttcccggacggcagagggaatgtcaaaggacagactaagctcgtagaaggacaggggattattcttcggacacgggttcgattcccgtctggtccatcttaaaaagcgccatgcagggcgcttttttttatgggaaaatgcggaatctttacatctccctgacttgcaattcacactgctatttcctataataagagcaaaatcacagcagaaacggaagagatgaggatcgaagaatgtctgtagaaaagagacaaaaagaacaggaaaagacctccatggtcgtggagggatttttatttgcaaatgaggcggaagccgcgcaggcgagaaaagaggcggagggcgtgaaatacgtcaaggagaaagcccagatggacgaccctgagatggtactccgcatttataataaaatgatacagcagcggctgtttgacacggcagtcggctattcttatctgaaggatctgcaggagtatctgcagtcgattccgtttatccggaaggaagatattttcccgattccggtgcagcatccgcaggtggaggagagtctccgcaaggcgaagcgcgcgccggcaccaaagccgaagacgcagaccgtggtaaaaaatgcggactacaggagacgctaccgcattgtgcgctggatcgcctttattctggcagtatgtgttgtggcgatgtttgcaattacggcgacgaccaataatacgacggtgttaaactacgagaatcagctgatcaacaaatacgaggcgtgggaggagcggctcgaccagaggcaggaagcgattgaggcgaaggaaaaagagcttggaatcatgccggaatagagcggaaaatacacagatttttcataagtagctgttagaatgacgataaaaagcggaaaggatacgggaacatggataagatcagaattctggtggtggatgatgagagcagaatgcgcaagctggtgcgggatttccttgtgagagagggatacgaggtgcttgaggcgggagacggcgaggaagccctcgatttattttaccgggaaaaagacatagcgctgattattttagacgtcatgatgcccaagcgcaacggatttgaagtgtgccgggagatccgggagacatcgaaagttccgattattatgctgacggcaaaaggcgaggagagcgacgagctgaacggatttgaactcggtgtggacgaatatatttccaaacctttttctccgaagatactggttgcgcgtgtcggagccattctgcgccggagcggaaagacgcaggatgaagaagcggcggtctccatgggaggaatcgttctggacaaggcagcccacatggtgacggttgacggagagcggatcgatttaagctacaaggagtttgaactgctggcatactttatggaaaatgcggggattgcgctctcacgcgagaagatattgaacagcgtctggaattacgattactttggcgatgcgagaacgattgatacgcatgtcaagaagctgcgtgccaagatgggagataagggaaaatatatcacgacggtctggggcatgggctacaaatttgaagtgacggaagaataatggaagtgacgcggaatgaagggactttttgataaaaagagacaggggcgcggcagacgtccgaaagagggcggactgaccagggaaatcgccggaattatcatcggtctggtggcgggaaccgtggcgctctgctgggtgcttaacacggtatttctggagcgctactatgtgatgaacaaagaaaatgtactgttgtccggatttactacgattgacgcggcaagcgaggatggaagccttgacgacagctcgtttgatgtgacatttgacaatctctgcgcaaacggcaatatcacggtcatggtgatcagcccggaccgcacgattgtcagatcctccgtgaacgatacacagcgtatgttaatcgagtttacggacattattttcggtggtacgcagaatgagaccacggtgctggcgcaggcggaggactatgtgatccagagaagaacggacaccaggctggatgcggaatatctggtactgtacggaaccctctcaaacggcaatctggtgctgatgcggtcggcgttagagagcataagggagagcgccaagacgtcgaaccagttcctgctgtacgtcgggatcctggcgattgcggtgagcacggttgtgtcggtcttcatctctaagagaatcaccgatccgatcctggaactgaccgagatttccaagcatatgacccagctggaatttgaggtctgctatacgccgaaaggaaagcggcgcaatgagatcgatgaactcggcacgcacatgaacgagatgtcgcaggcgctcgagcatacgatctcggaattgaaaagcgcaaacaaccagctccttttagacattgagaaaaagacgcagatagaccgccagcgcaaggaatttctctcgaatgtatcgcatgaattaaagacgccgcttgccctgatccagggatatgcggagggcttgaaggaatgtatcaacgatgacgcacagagccgggatttttactgtgaggtcatcatggacgaggcggataagatgaatcagatggtgaaaaagcttctgacattaaaccagctggaatccggaaacgagacgatcacgatggagcgattcgacgtaacagagctcatccggggcgtgctgcactcggtggatatcctcatcgggcagagcggcattacggtgacggaatgtcccgcagagcccatttatgtgtgggcggatgaatttatgacggaggaggtcgtgacgaactacctgagcaatgccattcattatgcgggagggaaaaaggagatttccatccgctgcagggagcaggagaagaacgtccgcatccgcgtcttcaataccggagacccgattccggaggaggatatcgacaaaatctggtccaagttctacaaagtcgataaggcacgcacgagagagtacggcggcagcggaatcggtctttccattgtgaaggcgatcatggactcgttccatcagcagtgcggcgtgatcaaccatgaggatggcgtggaattctggtttgaactggaaaaaggaaaacggtcatgatgcagcaaaaaatttttttgttgctatatttcctttaaaatgctaacataatgttagtttatactttgcgtgaggaatggaatcctatgagaagaacaagaatcaagatgatggcagcggtgatggctgcaacgatgctgttgggcgggtgcggggatgcgctctacgacctgacagacgacgaggagaacgtcattgtcaattatgcagcgcatatcgtcacgaagtacaacacgtatcagcgggaaggtctgacgtatgtgagtccggaagaaccggaggagacgcaggaggatgtcacggtgccgcagacgccggagacacaggacgcgtcagagacgggaacagccgcatctgcggaagatacggcgcctgctgtgtcggtggcggcagccggatcggcgtctttggacgaactgttcggagccgacggcattcagatgacctatgcgggcgcgcagcttgcaccggggtacatggaaggtgattattatgagatgaccccggatgccggaaaacagtatctcgtgctgtccatagatgtgaccaacaccggggcggacggagtgggtcttgacgttttgagtgtcagcccgaagttcacggttgtattgaaccagtcggtcaagagcacggcggagaccacattgctggatacggatttttccacctatcagggtacgattcctgcgggagggagcacccgcctggtacttgtattccaggtgccggatgatgtggcatcggcagacagtgtggaactgtatgtgcaaatggatcaaatgatacaaattattctgtaaaacgcgtgaaaaacaatgcatttcaggtaccaatgtgctataatgctgtcagatagatacgttgcggtattacgcgagaggagagagacaaatggatacaaatatattattggaatcgggaacaaacgaactggaagtcctggaatttaccttgggaaacaatcattatgggatcaatgttgcaaagatcagggagattttaacctatcagccggttacgcctgtcccaaattcacatccgagtatcgagggaatcttcatgccgcgtgatacgatgatctctgtggtaaatctgaagcgctgtctgggaatgccggatgatgcgaaaacagagggactttttatcattacgaactttaacaagttaaacattgcatttcacgtagatgccgtgcttggtatccaccgtgtttcctgggaggcgatcatcaagccggatgccacgatcaataccgagcagaacagcgcctcgaccggtgtcatcaagatggatgacaagctgatcatcatccttgactttgagaagattgtgacggacatcagcccggagacaggactgaagatgtccgatatggacgacatgggacagcgtgagcgctgtgaatctccgattttgatcgcagaggattccccgcttcttagcagactgatcacagactgcctgaagaaggcaggctacacgaacctgattgtgacaatgaacggtcaggaggcatgggataagctgcaggagtttgaaaaagcaggcaatgtgcgtgagaaagtacactgcattatcacagatattgagatgccgttgatggacggacaccgccttacgaagctggttaagacaaatgacaatatgaagaagattccattgattattttctcatctcttgtaaatgaggagatgcgcatcaagggagaacagcttggagcggatgcccagctgacaaagccggagattggcagtcttgtttcggcgattgacgacttgattgacaagagcatggactgagaatgaaatgaagaggggatgtgatggagcaggatcacatcccccgcttaagttataggtcgatggaggtatcgtatgagcggagcagaggaatatctggatgggctgctgcactccgtagagggaggaagtcctgccgacacagcccgtgagacggagccaggcgatacggcagacgggctttatgcagaaaaagaacaggagacaaaaaaagctggtatgagtgaggaagacgattttttaaagtcctttgaggcggatacagatctggaaggagatgcggacacatttatcagacagttcgaggatgagctggatcaggcgcctagagaggaaagaacacagaagacgacggaggagaacaatcagttcttcaaggatctggatggcattttagacagcgcaagggatgcggatgagagcaccggcggtgcagaagcggcggagactgcccatgcgtcggaggacggagatcttatggtcgataccatcggtgatttccaggacgacgattcagatctgatggatctgctgcagtcggagggcgatttcccggatatgagccagatggcggatcccactgctccgtccgcagacacagacgcagaaatgccggacgtgacggcaatgccggagactgcggatgaggtgcaggacgaggacgacgggaaaaagaaaaagcgccgcaaaaagaagaaaaaagatgagccagatgccggggatgaggctcctgcaaaggagaaaaagagcctgatcaagagaatcggcgacgcactgtttggtgaggaggaagagacggaggaggcaccagcggacaccggggaattacagccggaaggtttagaacaggcaccggagctggatgatctttccgatgagaatttaaagctcttacaggaactggaaggaacgggggcagccgagccggaggcagaggcggaaccggagatttcagaagaagagaagaaagcgcaggcaaagaaggaaaaagcagagaagaaggcgcaggcgaagaaagagaaagcggagaagaaggcacaggcgaaaaaggcgaaggcagagaaaaaagcacagaaagccaagaagccgaagaagccgaaggagccggacaatacaccgccgcttccgaagaagccggtggcgctgattatggtcatggcggcgtctttccttgcacttgtcttggtgggaacgaatctgttcggatataccctgagcttcaacaatgccaagcaggcgtatgaactgggcgactatcaggcagcgttcgcggatgtgagcggacttacggtcaaggaggcagatcaggagacctaccagaagtacagcatcatggcgaatgcagccggagaatatcaggcataccagacctttatggaaaacggtatttatgacatggcactggattccctcatccgcgcggtcggaagatgcgataagtacagcgaggaggctgcggcttacggctgctccacagaactcgcgaagatcagagaccaggcggtggcaggactgtccggatttggacttacgcaggagcgcgcacaggaactgtacgcggagagtgagcgggatacttactcgcaggaactgtattcgatattggcggcagcaggacttggatgacatcgacggagtgagagaatgatagcaattatagactatgacgcaggcaatttaaaaagtgtggaaaaggcgttcctcgcgctgggtgaggaatgtgtggtcacgagagatcatgacagcatacgccgggcagacagagtggtactgccgggtgtcggttcttttggaacggcaatgcagcagctgaaaaaatatgagctggatcaggtgatccgcgaggttgtgcaggaagacaagccgtttctcggcatctgtctgggtctgcagctgctgtttgagggcagcgaggagagtgacggcgtggagggacttcatctgctggacggagagatcgtgaagattccggaggcgccgggacttaagatcccgcacatcggctggaattcactggatttcccgcatgaaggaagattgtttgccggattgaaggaacagccgtatgtctattttgtacattcctactacctgaaagcgaaagatccgtcgattgtgaaggcgaccacagagtacagcgtgacgattcatgcttccgtggagaagggcaacctgtttgcgtgccagtttcacccggagaagagcagcacagtgggacttcagatattgaagaattttgcggaaatatagcggaggcatgcgatgtttacaaagagagtgattccctgtctggatgtgaatggcgggcgtgtggtaaagggtgttaattttgtgaatctgagggatgccggagatccggtggagattgcggcagcttacgataaggcaggtgcggacgaactggtatttctggacattaccgctacctcggacgccagaaataccgtggtcgatatggtgcgccgcgtggcggagagagtgttcattccgtttacggtcggaggcggcataaggacggtggatgattttaaggcactgctccgcgagggcgcagacaagattgcgatcaattcttccgcgatcaaccgaccggaactgatctcggaggcggcagacaaattcggcagccagtgcgtggtggttgcgattgacgcaaggagacgcgcggacggctccgggtggaatatctataagaacggcggacggattgatgtgggtctggatgccgtcgagtgggcgatgaaggcagaccggcttggcgcaggggagattcttctgacaagcatggactgcgatggcacgaaagcgggatatgacattgaactgaccagacaggtagcggaaaatgtatcgattcctgtgattgcttccggcggcgccgggacgaaggatcatttttatgatgccctgacaaagggaaaagcggatgcggttcttgcggcatccctgtttcactataaagaacttgagattatggatctgaagaacgatctggcagcgaggggcgtatctgtgcggcgatagcacggtgcgcccacactgttgtctgtgaaaaaaggagtagtgggatatgtcgatgattgacaatgactggcttccggcaatccagggggaattccgaaagccgtattaccgggaattatacacatttgtgcgggaggaatacagcagaacagtggtctacccgccggcggaggatatctttaatgcctttcattttacgccgcttagtgaggtgaaggtgctcctgctgggacaggacccctatcacaatgtaaatcaggcacatggtctttcgttctccgtgctgccggagcaaaaggagatcccgccttccctgcagaacatttataaggaactgcatgatgatctgggctgttacattccgaataacggttatctgaaaaaatgggcagatcagggagtgcttctgctcaacaccgtcctcaccgtgcgcgcgcaccaggcgaattcccatcagggaagaggctgggagcagttcactgatgcggtcattcaggcagtaaatgcccaggatcgtccgattgtgtacctcctctggggcagaccggcgcagtccaaaataccgatgcttacgaatccgaagcatctgatcttaacggcaccgcatccgagtcctctctcggcataccggggatttttcgggtgccggcatttcagcaaggcaaatgcgtttcttgaggagcatggaaccgcaccgatagactggcaaattgagaatatttagtgtataatatacttacaataaaagcagacaggaggtattggttatgcgtgtaaaagcaattatgatgcctttcagtaagctggcgtgtatcagcgtggagaatacggtagaagaggcaatgaagattatcgacgagcagggacttctctcgcttccggtagtggacggacagcagtttgtgggtgttttgtccaaacagtttttgtttgaggaatttttccggaactatacagggaccagagaagaatttgcacagcgaaaagtgatggagttcatgaagacaagaattgagaccatcggtgagaatacacggattgaggaagcggcagcaatgtttatcacctccaaagttcgttttattccgatcacgaacgagcagaacaagctgcttggaatcgtgacgcagcaggcggtattcaaggaatatcagaagatctttggtaacaaacacaattccatggcaatctacacgtatgatatccgaggtgtgctcggcaagatctgtgagctgattgctaaggagggcggagacatctgcaacatgatggtgattccgacggatgttatggatctggcagagatcttccttcgggtggaagcgccggattttgagcgtgtggtacgcgcgttagagcgccacggttatgatgtgcgtgatgtgaagtataatgatcagaaataatacagaacggatggatctggaatagaagagaggggtgccgcgcatgtgcggcgcccctctctgtctgcataaaaaggagctccctaaaatgaggagtgcccagacactcgcgcgcctgggctattatgaaaaaattatcaaatatattgtaacgaattgtcttgttttttgataattttattgtagcaataagatatgaataaactatgaacaatagttaaacattttaataaggacaagcaccagaaaatgcttgaaaaatctaaggtttcgggctaaaatgacgatatagaacatgaggtaacaagaaggtattgtgcacaaatgcaacagccggatcaacattctgacacggaggtcagatgctttttttcaaaggagtgatagagtatggcaagtatttcaggatatgattcatcgtcactgggcgtgttattttccagtctgaaccggaacaatacaacttcctctctgctgggaggcggaagcgatctgctcggaatcaattattccgattatgcgacgatccgcaacggaagctatttcaagcttttgagtgcctattacagcaagtcggattccacggacagcgccacgaaggtcagcccgtcgatctcaaccgcgaaggatgacgcgaagacactgacccggattgagagtgcggcggagagtacggagaagtcgctttccaagctgacagcaaccggaaaggattctgtgttcaacaaagtggagaagaccgcggaggacggcacgaagacgcaggagtatgaccgtgatgccatctataaggcggtgaagtcgtatgtggatgattacaattcactgctggatcgggcggacgattctaagacgaagagcattctgcgtgcggcgaactctttgaagagcaacgccagagcgaatgagaagacgttggagaaagcgggcattaccgtggatgccgacggcagactttccgtggacgagaagagctttgagaaggcggatatggacaagctgaagtcactgtttacaacgcacggatcttatgcgacgcagacgaatgtggatctcctgaagatcgcatccaacgcgaagagtgaagcggcgaaggcgaatacctacagcaagaatggtatgtatacttataattacagcaccggagatctttacaattccggaatttaacattggaagacacgaagagatgaggctgccataccgtaaggtgtggcaacctcatatgtttgttggcaggagcgggcatggcaggaaaaaaagtagtagtcggtatgtcgggcggagtggattcttccgtggcggcatatttgttaaaacagcagggatatgatgtgatcggagtcacaatgcagatctggcaggatgaggatcagtttacacaggcggagagcggcggatgctgtggactctcggcggtggatgacgcacgcagggtggcggatcgtctggagattccgtattatgtgatgaatttcaagcgcgagttcaagaagaatgtcatggattattttacagcggagtatttaaaagggcgcacgccgaatccgtgtattgcatgcaaccgctatgtgaaatgggaatccctgcttcaaaggagtttggagatcggagccgattacattgcgaccggccactacgcgcgcgtggaacagctttccaacggaagatatgctatccgcaactccgtgacggcggcaaaggatcagacctacgcgctgtttaatctcacgcagaagcagctctcccataccctcatgccggtaggagattacacaaaggatgagatccgtgcgattgcggaagacatcggactgatggttgcacataaaaaggacagccaggagatctgttttataccggacaatgattatgccggatttatagacagagagtgcggggaaatggttccgccgccgggcaactttgtgtcggtggacggagagattttagggcggcacaagggaattacacattatacgatcggacagcgcaaaggactcgggattgcgtttggatatccggtgtttgtgacagagatacgcccggagacaaatgaggtagttctcggaagtgataaagatgtgtatacaaaccggctgtatgcgaatcagctgaactttatggcgctctccgacattgaggagccggttcgcctgaaggcaaagatccggtactcgcatgcgggaagctgctgcaccgtgcggcgcaccggtgcggatgagatctgctgtgaatttgaagagccggtgcgcgccgtgacaccgggacaggcagtggtgctgtacgacggagactatgtcgcgggaggcggcgtgatcacacacgcttaagcgcctgcatcacagggcaaacgtgtggattgcatgcgcgacgccgctgttttcattggagcgcgtcacaaagtctgcgatctctttcacttccggcagggcattttccatggcgacgccgatcgctgcggtttttaaaatgtcgatgtcgttctgggtgtcgccgcaggcaagcgtctcttcgatatcgacgccgaggtgcgaacagagcagggtgagaccgtttcctttggtgacgcccgctctggtgaattccagattgtggtagccgccggagagaaaggtgatctcggggtgctctgacaggatctgcatcacttcgtcgcggtagagaaaagtgccgtcctcctgcggataaaaattcagcgtcatcttctggacgttcagattgtggacgcggatataggcagcgagatcatcggtgaaggttctggtccggtgaatgtagcgtttgattgatgtgggcatgtccaggcagtcgatctttccctcacaggaacgctggctgaagccgtcgccattgataaaagcatccatatggatgctctttttttgcagttcttcgatgatggggcatacaagcgcaggctccatcgcagattcatggatgcagaggcgatccggcagatgatagacggcagcaccgttggaggtgatggcataggagacgccgagaccggataaaagtgtgacgggaagcccggcgtaagggcgtccggtcgatatggcaacgtgaattccgcgggaggaagcttcgcgaatggcgtcctgatcctcctttgagatctcactttgtccgttaaaaagagtgccgtccatatcgagggcaatcagactgacaggctgtttcatagtcgagtatcctttctgtaaatgtatctacagaatgatacaataaaatgggaaaacaatcaagaaacggcggtgccgtggcgcggattgcaggaaacattggaaaatacttgcacccggcatggggaaatggtaagatgtggcttgataagcaagaacggatgatagagaggatacgggaatgaccagagaggaatttgcgacacttgtgggaagcagaccggtgatattggacggcgcgacaggaacgaatctgcagaaagcaggaatgccggtcggggtctgcccggagcagtggattctggagaacccgggggttctgatagaattgcaggagcgctatgtggaggcgggcacggatattttgttcgcgcccacctttacggcaagccggatcaaactggaggagtacggactggagaattctctggtgcagatgaaccgtgagctggtggcactctcaaagcgcgcggcaggcggcagggcatatgtggcgggcgatctgacgatgacgggacggcagctttatccgctcggcgatctgatgtttgaagatctggtggaagtgtataaggagcaggcgaaggtgatctgcgaggcgggagcggatctttttgtcgtggagaccatgatgagtcttcaggaatgccgtgctgcggttattgctatccgcgaggtgtgtgatctcccgattatggtgtcgctgacctacaatgaggatgggcggacgctctacggaactgatccggcaactgcggtgattgtgctgcagagcctcggagcggatgctgtgggactgaactgttccaccggaccggaggcgatgattgatccggtacagcagatggcggagtatgcgacgattccgcttctggcaaagccgaatgccggtatgccggagctctgtgacggcgtgaccgtgtatcgtaccacgccggaggagtttgcgtcagtcggcgcgaagcttgtggaggcgggcgcggcgattataggtggatgttgcggcacgacaccggagcatatccgtgcgttaaagcaggcggtgggttccatgccggtgcatatgcctctcacaaagaaaagacgtatgctcgcctcggagcggatgcatgtggagatccggcttgacggtaagttcatggtgatcggagagcggatcaatccgacaggaaagaaaaagctgcaggcggagttaaaagagggaagcctcagtatggtgcgcactatggcgacggagcaggaggagaacggcgcacagattctggacatcaatatgggaatgaacggaattgacgaaaagcagatgatgttagacgccatctatgaagtgacttccacggtagatctgccgctctgcatcgattccagccatgtggatatcatcgaggcggcgctgcgcatctatccgggacgtgcgcttgtcaattccatttctctggaaaaagaaaagatcgagtatctgctgccgatcgcgaagaagtacggtgccatgtttattttgctgccgctctcggacgaggggctgccgaaggattctgcagaaaagcacgggatcatccgcgagatcttaagacgcgcggaagcgatcggcatgggaaaagaggacattgtggtggacggactggtggcgacgatcggtgccaatccgaaggcggcgctggagtgttttgagacattttctttctgcaaaaatgagatggaactgccgacggtctgcggactgtccaacatttcgttcggacttccggagcgctcctatgtcaacacggcatttctcacaatggcgatcggaaatggccttacgatggcgattgcaaatccttcccaggaacttctgatgaatgcggcatttgcatcggacatgcttctgaacaaggaggagagcggcatccgctatatcgggcgcatgaattatctgtccgagaagcatgagggcatggaacatgtgtgggtacctgtcgggacggcgaagggcgctgccgtgaaaggtactgccggcttacaggcgggagacacaggcggcgcgaagaattccggaaacacgaacgaggcgcacagcgcggtttttacggcggttttaaaaggaaataaaaaccatattttggatgacgtcaagcacgcattagacgctggggagaagccggatgacatcatcaacggacatctgatcccggcgatcaacgaggtcggcgagctgttcgacaagcagaagtattttctgccgcagctgatttcttctgcgaatacgatgaaggtggcgatcgaatatttagagccgatgttagcacgctcggacaaggagccgaaggcaacgctcgtcgtggcgaccgtggagggtgatatccatgacatcgggaagaatcttgtggtgctgatgttgaaaaattacgggtatcatgtgattgatctgggaaaagatgtcccggcagatttgattgtagatactgcaatgaaagaaaacgcaagggtgatagggctctccgcgctgatgacgacgacgatgatgcgcatgaaggacgtggtggagcttgtcaaagagcgcggatgtacggcgaaggttgtcatcggcggtgcggcgatcacggaaagctttgcggaggagatcggtgcggacggctattccaaggatgcggcggaatgtgtgaaactggtggatcgtctgttggaggaagagtagaaggcgaaaagcggtcttttccgccttcaaactgccccgggaaaatagatgcaaaaaaatagaaaaaaagtgttgactttttgcaatacggatagtatactaatcaagtcggttgcggtagcgaccgatgaatatgggatcttagctcagctgggagagcatctgccttacaagcagagggtcataggttcgagccctataggtcccatagatatcaatataatatggcggaatagctcagttggctagagcacacggttcatacccgtggtgtcgagagttcaaatctcccttccgctactatttttttaaaattgaaaaccttgtgaagccttgattttactggacgaaaggagattctgaatggtgtcttttctgaaagccaaaatcaaaggtaacaccaaaggtaacacgaacaaatgtatggacgcttgatgcgttcttttttattgcaattttggcggtaatgcggcgggaaacagacgttatttagacggtattctgacggttttaccgtctttttttatgccacaatataagcaaagggagggatgataatgttttctgacgatgttcttgagaaaatttttgccagaaaagaattgcaatcattagatttgtcaacgcagtcatctatcattcacgcaattgaggatgttttggaggaggttgaagaaaatgaacatgaacggagtttatccggcaccgggctatagtcagcaaattccttatcaggcatcatatgggtataatccatatggtaatcagcaaagaattgaacagccgcaaaattattttcaaccggcgcaaacacagcaaattcaacagccacaaatgacgcctattggaataaatggaaaaattgtgccttctgttgaaaatattactgcaaacgatgtgccgatggatggaagcgtggcgttttttccaaaacaggatatgtcggaaatatacgccaaaagctggaacgcagatggtacaatccgcacaatcgtttttaaaccggtttcaagtgataccgttagcaatttatcacatgatactgaaaaattgaaatttgacctatcagacgagtgcacaggtgcatttatgcaaaagttcgatgaactttttggaaagattgaacagatagaaaaccgattagataaactccctagcggtcaaagaaaaacttcacaggtaaaaaaggagagtgatccagagtgaatccaatgcaggcaattttaaatcaaatggtaaattccccacaggtacagaataatccaatggctaaaaatgccatgcaaatgtatcaaaacggagacagcaatggcttaaaatcaatggcagaaaacctttgtaaagaaagaggaattacagtagatgaagcaaagcaaaaggttatgagtatgtttaatcattagtacattttgggttgcgcgcacaataaccggttatcccatttgtaaataaatcagatggaggtaaacaaaatgtttaatggaaacgcatctcctagtcttgctgatattgcagcagtgacaggaaacggaaggaacaatgatggtatgtggggcggcgatggctggtgggctatcattatcttcgctatgatttttggctggggcggctttggcggcaatggctggggaggaaacggaggtatgggttcaacagcatctgcatacactgactccgcaatccagcgtggatttgacacacaggctatcatcggaaagttagatggtatcacaaatggtctctgtgatggattttacgcacagaacactgctattatgaacggttttcatggtgtagacaatgcaatctgcaaccttggctaccagacacagcagggatttaataccacaaacgtgacacttatgcaggcgcagaacgctttgcagtcccagatggcaaattgttgctgcgagaccagagaggctatccagggtgtgaactacaatatggcgcagaacacctgtgcgctgcagaacaccatgaacagcaacacgagagacattattgacagtcagcaggcaggaacaagggcaatccttgattacctgtgccaggaaaagatttcttccttacaggcagaaaataacgacttaagaagagccgcttcacaggatcgccagtctgcattgctcactactgcaatgtcggcacagacccagcagatcatcaacgctgtaaatccagctgcaatcccggcatatgttgtgccaaatcctaacgcttatgcgtatggttgtggatgcaacacaggatgtagctgctaaaagtagttgctacacaaaattgaataattgagtatcttaattgagtttaactcgactatgtctgcaaaagcagtattacttataagcgcaaagggcagactgaaatatgtttgccctttatttcatgaataggaaggtagaatacatggacgaaattaaaaataaatttatcgaagcaatcaaaaagattgattttgaaaagcttaacatttcggagcttaaaactcttgcggaaataactggatcagtagaaaaaatggcaaaaaaagattattctgagctattgatggaaaaattttctccagaccacggatttgttttttcgagctccgatacaaaaacaatagcagaattaaaataaggaggtcatattatggcagaatttacaggaattgcattacaaacagttgcacagggcgaagatgtagcacttacagaaactccggtatgcgcaacaaaatgcattgttcatagacagggaagcggcattgttaaattaagaggacttacaaatcagtgccgggcaagatttttggtatcttattccggaaacattcaaattcctacaggtggcacagttgaagctatttcactggctattgcaattgacggagaaccgttgcagtcgactcgaatgattgttacaccggcggcagttgaaaatttctttaacgtttcggcgcaggcatatgtggacgttcctcgcggttgctgtgttacggtagcggtgcagaatacgtctacgcaggcaatcgaagttcagaacagcaatttaattgcagtccgggaagcgtaaggagggcggttttatggatattaagagaatgcacgaaatgatcgaaaaactgtctgaaagcgcagagtgtgagttcgcaaaaggtatcgaatgtgtagatacagaagagatgggaaaagtcacggacatgcttaaagaccttgcggaagccatgtattaccggacgcttacaaaatcaatggacgaatcagacccagagcaggttcttgatatgtttgagcgttacggagacggcagacggtattatgaccgttaccggtatgcagacggcagatttgcgccaaagggaagaggaacgcggagaggatatgacgagccgccttactggcacatgacaccggaaatgtatcacgatatggagcatgaccgcgacattgatcgaccacatgggcgaatgtattacacagagcctacaattgcggcagatggcggtatgcgcgaccgcagagagggcaaaagcggcatgagccgcagaagctacatggaaagtaaagagcttcacaaaggcaatacgccggaggacaaggacgcaaagatgcatgaccttgaaaaatatatgaaagagctttcggaggatatggcggagcttatttccgacatgaccccggaagagcgcacaatgacaaaaagcaagctgtcaacgcttgtttctaaaatgtaatggcaggggcagaaatgcccctgtttgtttgaacattgacaactgaatatcagctagtgatttgtggatttgaatgtactgctcccaaaatatgggtgttgatttttgagggaaattttttgaaaaaagatattgactttttggtgtgacataaatataataaaggtgtgacaagaaaggaagtgattcaatgtcactagcaggtcgtccaaaagttgataacccaaagtcaaacaggttcagcattcgtcttgataaagaaactgaattaaaattgagattgtattgtaaaaaatacaatcttactaaaggcgaagctataagacgaggaattcatcttcttttggaaaaagaaaaagagtagtcaagcattacttggaggtaactgactactctgacaccaatccgaaatgaattgataaatcaatcatatcactttctttcggaggaatcaaacattttttgaaaagaaaggcagtgaaagataatgaacaaatttttagaaatagtatacgcaagccaaattgcagatgaggaacagggtgggaaatggcgtgaattttttgaaccgctcatggagagacttaagggcattgtaagcgaaagcgtttatgatgaattgcttgaacttcttattgactgtactactgataataaccgcttctatgccgtagagggcatgaaacttgctattggcattatggacggaacttatgttctgaaagtataagagagggggatttgctgatgaacgatattcagatttcagaaaacaaagaagaactgacactgacaactatcgacattgcggacatgatggaaatgccgcactggcagattttaagaaagctggacggaacgaaaaaaatcaaaggaattatacaaattttaggagacaacaaaattgttgtcaccgactattttataccgtctacatacttatctgaacaaaataaggagatgccatgctacaaagtaacccgcatgggctgtgagttcctcgcaaacaaatttaacggggaaaagggaattgtctttactgctagatatgtgaaacgatttcacgacatggaacaagcgctgaaaaaaccgcagcctgcaattacggagaaagacccgtttgagcactgggagattcgatggaaacatgaaacggaaacatggttttcaaagaacaactggaagttaagtataatcctggaacggtttggttggactcgaaaatttttatatcacaagattctcgtggaattatcggatctgcacaacttacgtgcaatcgaaagggcatattacgccagttatggatatccaccggaatacgctcttgatctgcttgattttaatatagacctcaacgatacggcgacaagatacatcaattacctacttattgaagaataaaaggtaaaataagcatgaatttagaaaccactagctgatatttggctggtggttttttttggaggtaaatatgtttgtgataaatggtattgaatggaaaatagaatttgtccgcggcgcaagcagtaaactgatgcgctctgatagctctaccagccttgccgtgacagattggaacgacagggctatatatgtttcagataaaccgaaaaatggttatttgcgcaaaatactagcgcatgagctttgccattgtttttgtttttcctataacattcatatgccgattgaacaggaagagtatcttgcggactggataagcctgtatggggcagatttgatttatttgctggatgatttgatggcaaacattgattggagggcggcatagtggacaaaatagatgaattgttaatgtatgtgcagaagacaaaccctggaatgacaagggaaaagttgatagatgaactaaacaaaagcgattatgccgcaaaagctttgctttttacttcggaaaactttcggaaaaattttcgatcccccctaccttaagatttggaaaaggattttcggtttttaatttttaaaaaatttttgaaattttcgcccaaatattcggaaaaaatttgatacccccctagggtcagatttcggcacgaaaaaccgtttttgagattttgagaattttgttcagatttttgcaaaatttttttgaaacttttttgcaagtgcaagttaagattgcactcatccatgatctggtcgtacttgatcttgctatgtgccgtcgtccgcttggaagcgctgaaataatgcagacgcggaaacctccgcacaaatgcgcaaaatgagtacaacaaataaagcaaacgtctacatgacattgcaactatacaggcgcgcacatgcctataagtcattatatgcacaatacatccaaaatgtcaacgcgcaatgcatctgctttgcgtcaacaagtataaaccaaaaaaagcgcagctcgccagacaataccctagtgagataatgacgatttgcatatttgcgcgcatttgatctttgcacgcatttttcgtgctgtattccgcggtatacgggcaaaagcaagccggggaatttccccggcatattgcatttctgcactttttcaaaaaataacacccaagcgcatacagtccattttccgatcgcaaagggcgcgccacttttcgggatcacctttgatgttttcggcggttctggtttccgcccattcgttccgcgctttaatatacgcgctttttgcgtcgtctttttttgtttgtaagtttcccataaatcccataatttaaccatcctttcattgtgcgccctgtctcatcggtgcaggtggggcagttcctgcagaccgccgcgcgggcggtttcgactatttgcaaattctgcgaaaaatttcaattgtgagttctgcggcagctctttttctgtcggacgtgtagccgcggcgcttgcttttcaaggctttttctgcctgcttaagatttccaattccccagtttccggctttttcaagtttttcccattcttccggcgaaacctttatagctttaagcgttttcgggttaatgctaaagcatttactgtcttctgggtgcaaaagctgacacagcggaatatattcatgcgttcccatgttctcgccgatattccagacaaaaaatcctttcggaatttttgtgacaatctcaaaaacgtctgttttaccaattgctgtagtggtataaattttattgttttcaattcttaaattttccataaattccctttctggtctgccatcatcagagccgggagaccatcccgcggctgacgctccgatctggagcgtttcggctatgctctacagatttcataaacatttccttcgacgtgttcaaagccaactttttcaaaggctcctatgctgtaaaaatcagcggtaagttctccgaaatggttatactcccagttgatcccgtttctcttaaattcctggactgcattaccgtttttgcttccggatatccaaataataaataaccctgttcttttcatgctgcttccctcgctttcgtttgtttccttgttgatactataatatcactttatacagtgacagtcaacatgttttatcactttttatggtaatattttgttgactttgaaaactatatattatatagtaaatttataaaacacatcagaaaggaatgatataaggtgcttaaatataaatttaatgtgggggatgcgttagaacgtgctgggtttaatatgtacaaagcaaaaacaaccggacttttaagccaagaaacacttaaaaagataaaaaacgaggatacaaatataagtgctaaatcattaaatagcctgtgcttaatccttgatatgcagccaaaagacatatttatatatgaggagacagcggaagacctggaacagaaaaataaaatttaaaaacttttaaaatatcacttgaaaaagtgataaacatatgatattataatattgtcgaaaggcaataaggcgaaagccagaaaggggaatcatggacgaagatatgagcgtatttaaaagttacttaagaagacttttacaggatctgaaagaccttaaggaagtattgaaggctaaggattatgagaaagccgaaaaaatggttgatcgtctcatagacgacacccaaaagggcatcgaggacaactaagcaacaagcaacaaagggcggcgcaaaagccgcccagtaaccaataaacaagataaaaaaaggagaatgaattatgaaaaatacatgtgtaaacgagtacggaaaagaaatcaattatgcagtagctgagaacttaatggatgacgatttgcgcgaggagattcaccgagagttggcgccgtgctcggagcaggagttttttgatgagtacgcgaagcggcacgaagagaagttcggcgaggtttgggagttagcaaaagaaaacccgcagtattaaaacataatgcaattattaacaggcaggcgttaggtctgcctgtatttgcttgcaaaggagatttttatgattaaaaaatgcgtgatatgcggcaaagaatttaagtgctccccaagcgacaaaaaggttacgtgctcttcggattgtagatcaataagggcaagccggacgcacaaaggcaagcggaacaagtggagcgaggcgtcaaaagaaaagttaagggggaaagggcagactaacaacctacaaaaaggcacgccggcagcaaaaaaaagccctaagagcggccgatacgaaacaaatgtaaatgctaaaagctggcaccttatatccccggacggaaaacactattgttttagatcattaaatttttggctgagggaaaactgcgaggaattatttgattgcgccccggatagcgcgcaatttcgcaacataacgtcaggattaagcagagtaaaaaggtgcgtcatggggcaacttccgccggatcagcgaccagggtacacatacaagggttggacggttgccccgataggagacgacatcacagatttagcgccagacagacaaaataaaagttaataatctggtgataaagggagatattttctatctctcttttttgatttattttaacgtttatgctttaaagcgataaattttgtatacagaatggatacgaaatggaaacgtagataagattagattagtatattctctccaatacattgtattttttatcaaggagtaaatattatatagtatatatcaacagtacaaaaatcataaactatatactttaacacgcgcggatataatctatatatgcgatatacccagtagtttaaatttatacttgacaaaggctatacacaaatgatattgttatcgtaaattaaaaagcatccgggcaacagagagcgcacaggacccggagaacggaaacggacttcatgcagccggtacagtcgagatcgtcatgatctgattgtatcagttgcattttttattttaagtattccagtactggagagaggagatatataacatgtcagcagttgaaatgcaggaaataaataataataccgttgatgtttttaaaagtgatattgacatgtatataaatctctggatggaagagagacatgtagaggatttatgcaaagtatcacagaatagatggtataactgctgtaaatatatttatgagcatgtattcaaagtaaatccaaagtacctgaaggatgataataatattaataatgcctatgatacagataaggttaacgaggtattagatatatatatagacctgtgtaatgactacgagaaagtagtgaatattgttgggtttacattctttaccggaatacacagagacacgttaaacggatgggttaatggcgtgcagctaggctcatcaggttccgacatttgcaaaaagattgaccaaatgagggaggaaagtcttgtaggtttgcagatctccggaaaaaacaatcccatgtgctacatgccgtcgctcaacaagtactgcggctttaatatgcctggcgtgagagaccagggagccagagccagagcattgacagcttcggagctccccaaactgggaagcgggaattgtgcgagattgccggacaaatttgacaattcaagcccggataatggtgaaattgtgatagacaattcaaacaattcaaaccccagtatttaagcgcattacgccgcatgctttcgtttaaatggtttaagaaacttaggtttaacgaatagttagaacgcaaacagagaattgcacgaacaattagaataatttaaagaaaaggaaaacgccggaagaagcagccagcaggagggggagggggttgcaaaagcccagaaggagctgcctactaagtcactcaaatatcctcaaaaacaaaaaggcctgtctatcgtggagggactatatgagaccacttaaaatcacggcaccaatagaatcggattctgaaattagcttccgggatatggtcaataggaaaatagaatgcttgaccgcgaagtacattcggaagttgtagacataaagtacggggtatacaggatcggatgtagcacatggtatagtgcgataatattttatcgataatcacatcaaagacaatcaaatcaaattcacatcagataaatttcaaaaattacactcgataataaaattcaaaaagattccaaaaggaagaaaataaaatgttagaaatgtgttttaattgcgactattgtgaagagcagaatggagattacttttgcacaaacaatgagagcgaatatgtcggagattatgtagaaaaagagttttcttgtccggattgggacggatcggaggaagatgaatgagggttgtgtcacagaaaaaagatgcttcatatgattttgaccggaccgaatttagaacaagctatgaatgcataagcgctacttttgatggaagaacttttgtcattgggaaatatgctacaccagaacgagcagcagaagtatttatggacatgcataaagcatatgcgcctgtacaggtagtttgcacaaatatggacgagaaaaaattttctgcattagttgcagaatcacaaaatgcaccgattagatgcgtagagatggatgatccaaggatggcagtaacagtatttgataaccttgtttactatatgccggagaaatagattgtttgcattgctcgtttgccaaatggtaaggcacttggttttgatccaagcatttatcggttcgagtccggtactggcagttttgaaaatggaggtaaatcatgttgattttaaaaacagtcataacaacatttgatgcccttgcgattttgacgtttttcttgcttggaagagatagcagaaacgaaaaggacgctgtggcagtctggggatcacttattgcattgtttcttgtcaatatatttgcaatgtggagatgatgatatggttttgtatgacccgatatttggtattcgcttccttccggaaattttaactacggtcggaagaatacatataagcagaaaaaaacatacgggagaaaccgacgttctggatcttgacagtgacgctgagcaccagtctgagaagtcggagcatccagtatagcttaagtccactggcattcggtttttgcaagaaaaaaaactcggcgcaagcaattattcggtgttagtggacgtcggcaaataaaaagatcaaaaatactatcataaacggcgcgctatgcgcgctgtgacggaacgtagcgcagatggtagagcactcggcttatatccgagcggtcgcaggttcaagtcctgccgttccgattgagagataagtgtaaagcttatctcggaatacgaaaagttcgtatttctcctttcgccactaggacgtttctgttaaggacggtgcgagaccgtccggtggcgtttgccgcgaagtacggcaaggcggaagaccgcttggtgttggatgatggttgtcccgtaatttgctgacgagcaatacaggcggattcctattgatagttcgggcatctatcccacggtgcctgagctgtcaaaaatacaattaggctgtggcggaaaaaggtagacgcttaagcataagacaaccacgctttggttaggaacaagtcattgaattaacaaggcaatgaaggaacctgttaagggtgttacccgttgtggaaagtcgttgttatgtgaggtgcaaatcctcaccagcctatttcctgtgatatcgcacaggatagtgcaacgcatggcacgaaaaatatgattgctaaccgtcgtatggcggttttcgtggatggcaagaaaggtatttgccggagtaagacgcttcgtgaaactgatagtcgaaaggtttcaagtgcaaggttcaagtccttgctccacgatggtgccgagctgattgatactttgattgatgtataaatatggttttaaattgtgcaaattgtggcgcaccaattgaaagtgacaagaaagcgtgcccttattgcaaaactccatatggtttccgtacgaagatagaaatggaaccatatattgattcaaacggaaggatttgcagacatgaaccggaaatgatagaagtaacaactttggaagattgtgaacctaggtttatgaggaagtgattgaaatgtgtgaattttgcaaggattatgataataacagaatattcggcgctaatattcccattcagaagtgtgcaaatgaaacgaatttgacaaatgcgcaaattatgatgaatacaggggacaaagtccccgggattgtgatttattcaaactactgtatggcgaaaggatactttgatattgcattttgcccgatgtgcggcagaaagttggtgaagaaatgaaacatcaaaaagaatggcgcacttgcgacaggtgtggtgcagaaattgaaaaaggaatactgtgcggaaattcgattacaaaaaatggcattttaaatgtcacatacgacttgtgctataaatgtatggaagattttgaaaggtttatgaaaaatgattgtaaatatcaataacagcacatacgagatgaacagcaaacagtacaaagcagttcttgatacggcgagcaacgctgttacctgcggcatatacgctgtggaaaagaacaaggtagcaatcatgcttcgagaggaatataaaagcaaggaagaactgaaacaggcagttggtaattatacggcgaaagggttcaaggtgcattggaaatgaaaaaaacacgttcaaaaattataatcaaaactagaaaaggcggttacacaaagatttattccaacggaaaatggcaaaagagagtgtataatattgatttccatgctgactgcacgccattgagatacccatacataaaaatttcttgcgaatttgataagaataagactgatgaaaacggttcggttatttacgacccggaaaaagaagaatttgcaaaagaacacgtagttgcaagaatttagtggggggcgatattgtgaaaatatcagagatgaataaatgtattgaagaaatgcgaaaatgctacaattttaaagatgatgaaacagaaattagacttgtaaatgagataaaccatgatgacaaatgtgtttatattagtacaagagatgaaaatggaacaacaattgaaatgacaaggtatgtagatgaattagtaaatgtttagttgctgattatcagcggaaagggtgacatatcatggctgatttgaaaatatttacagaaaatatagaacaggaagcgttaaatcagatatatacgcttgtaaaacagccagcattttcggattgtaagataagaattatgccagatgttcatgcaggagcagggtgtgttatagggtttactgctgatttaggagaaaaagtaataccgaacattgttggagttgacataggctgtgggatgcttactacaaacttggggaatattgatattgattttgagagattagataaaatcattagagaatatgttccaagtggtagaaaagttcatgaagaagaaaacacacctgtcgcaagtgatattgttgaaaaattgcattgcaaggaacagttgaaaaatatagattggataaaaagaagttgcggcacgttgggaggcggcaatcattttatcgaagttgataacgatagcaagaataataaatatcttattattcattcgggaagtaggaatgtcggaaagcaagttgcagaaatatatcagcaaatggcgattgacgatatttcgggaaaatcaaactttaaacaagatagcgagaaattgattgctgaatacaaaaaatgtaaaggagaaagagaaatcagcaaggctatcaaagaattaaagcagtcctacaaaacaaatacaaccaaaatccctagagagttatcatatcttgttggaaaacatagagaaatgtatttgcacgatatgaaattatgtcaagagtttgcgaaaattaacagaagaaccattcagagcattatttgttactatatgtgttgggaagttacaaaagaaacggaacgatttcaaacaattcacaactacattgaatacgatacaaatattgttcgtaaaggtgctatttctgcaaaaatgggggaaaaagtactaataccaataaacatgcgtgacggctgcattttgggaattggcaagggaaatgaagattggaattattcagcaccgcatggagcagggcgaacaatgagcagatcaaaggcaaaagaaagcattttgctagaagagtatcaaaaagcaatggatggaatatttacaacatctgtaaatacatctacgattgatgaaagccctatggcatataaaacaatggatgaaataattggaaatataaaagacactgttgaaatagttgacattataaaaccgatttacaatttcaaagcaaacgaataaaaacaattaccggctaacaaatagagttagtcgctaaccaacaaaaattattggcagaggtcttaaggcacttctgcttttttgcggaggtgcttttcttttggcaagttcaagcctaatttccacagtaaatggatatgaaaattacatacaggtgcatggcattgatgaacaggttatggatgccatggcagaagcggcaagggtagccattctgacggaaaaggatgttgagtatggattaaaggtttctgccagatcgaaagaactgacggagcagtttatctttcaatctacaggtggcacaccatgggatttagagaaatattcattccaaaacaagatatcttatgaaattctggacaaatattacgggattttgcttttggaagcgcaaaacaaagttgtggatagtgctttccagtatttggaaaataaaagagagcctaaagaacggttttatatgccaagaagaaatcaatttctcaaaatagggcttacacaggctttacaaggcatgattgatgataaatatgacatcctgtgcgtatcccttgttccgggagcaggaaaaacaacggtagaaaaaatgtttcacgcacttgttgccggatggtttccgagagatttcagtcttttttattcgcacagcggagatattaccagaatgtattacgacggcgtgtacgatatcgttacaaacgcggaagagtatacatggaatgaaatttttccggatctttccgtgacgagcacaaatgcgaagatggagcagtttaatgtcgggaagtacaaatcgtttccatccgtacaatgtacgtctgttggtagtaagaatgcaggtaaagtaagggcttctaagttcttactggttgacgatatgataggcggtatcgaagaagcaatgaatccaattatccttgataaattgtgggataaatatgccgtagatgcccgccagagaaagatacaggacacggacggtaagaactgcaaggaaatacatattgccacaagatggagcgtacacgacgtcatagggcgcatccagaatatgtacgagggaaatccgagagtaaaggttattgcggtaccggatgtagacccagttacaggagaaagcaactttgaatatgagttctccggttttacaaaagagttttttgaagaccaacaattattgatggacgacatatcatatcgctgtctctacaagcaggagccgattgagcgagagggattgctgtttccggaagataaaatacgccggtatcttaatttgccacatggagagccagagattgtaaccggtcagtgcgatacaaagggaaaaggaacggattactttgttttgccggtattgcaaaaatacggagaggattactactgtgtagattgtgtttgcgataacaccgcagattatgagatgcagtatgaaaatgcagcaaacgttctggcaaacaataaagttcaggaatgtgaatttgagagaaacgccggcggagaccgtgtcgcaatggaagtaaacaagcgtgtcgaaaaaaaaggatggatatgtaacattactgacacaccgacggagacaaataaggaagcaaggatcttccagtgctctaactggatattgcagcacgttatatttaaagacccatcattatataagccaaatgagccatatggagtaatgatgtctcttctcaagagatattcagtgtccggtaaaaagcaattggatgatgtgccggatgtattttcaaactttgcgcttagagtgacaaatggaaataacgtagccaaagtagaagcggcagtaaatccgtttaggaggtattgatatgacaacaaaggactatctaaaccagataagcaggcttaaccggatgataaataataagctaatagagcttgcacaacttaaagagctggcatgcagcatatcgtcaattacaaatgaagaaagagtaatgacaaccccaaattttgacaggataggcgcgaagcaggcaaagattgatgaaatggaaaggaagatcgatgcactggttgatgattatatcattaaaagagatcagattgtcagtcagatagacagcatggaagatgagaatgtctataatgttttgttttcaaagtacatagaaaaaaagacatttgaggttattgcaaccgaaatgaattactcttggagacagacaataaggcttcatggaattgcattaaaaaaatttgagcaaaaatatggagcaacttatttgtaaaatgtcatagaatgtcatattgaaaaaatgatatagttataatcgaagaaagcaacaaaagttgaatacttcacctcccccaatttagagaagcatcgtagagaaatctccggtgctttttcttttgcaaagaaaagaggactttatggtatatacaccaaaaacaatatattgcccgcgttgcggaagaaaagttgccacacacgatgggcgttcaacaatgaacatttctgtggaatgtaggaaatgccacaagaaagttgttttttatccggagaatggaaaaacagaattaaaatctcttccaatccgttcaacatccagtgggatgacgtttatttaggagcaaattatgaataataaatctctccaagatcttgttaagggctgttatggtagaaaaattttatatacagatgttgaaaccatcacagcagataatattgtcaatgtggtgggagactgcatcggaaatttttattacaacaaaaccatcatagaatatctttggcgatattacaaaggtgaccagcctgttttataccgtgtaaaggtgcaaaatgctgatattacaaacaaaatagtagaaaatcatgcgtatgagattgttcagttcaaagtaggacagacatatggcgagccaatacagtttatcagtcgaaaagatgatgatgaaattaatcgggcagtggatgcgctgaatgactatcttgtggatgcgaataaacaggaaaaagacattaaagcaggagagtggcagtcagcaactggaacatcttttaaggctgtgagattttcaaatggagaaataccatttcagattgttgcccctactccgatgaatacttgtgttatttataatcggagtacggaagaaccggtgattgccgtacaggagcttaaggacgaagatggaagatggtacaaactgtgctatacagacaattattcatgcaaaattcaaaatggagtagtttctgaatggaaattgcatgcatttggaagtatacctattgttgagtttccaaataatcatgagagaatttctgatattgagcttgtcataggtattttggatgccataaacaatatgcagtcaaacagaatggatggaattgagcagtttgttcagtactgggttaagtttgtgaactgtgaaatcgaccaaaaaacgtttgaagagatgaaaatgagccatgctttgacggtaaagtccaataacaaggataacaaagccgatgttgagatcatgacgcaggaacttaaccagagtcagtgccaggtggcaaaagatgatctttgggacaatgccttggcaatattagcaataccaaacagagagtcacaaaactctggaggagatacacaaggagcagtatcattaagggctggatgggatttttcaaagacaagagcaaaattaaaagacccaattgtgaaatcggcagagaagagacttgcaaaagttgtcttaaatgtaatacgtgttaaggaaaatgatttgaaattgtcaatgagggattttgatgtgcaaattaatcatagccctcaagacaatatgtatacaaagtcgcaaacactatatcagcttttagagtgcggcatacatcctcttattgccattaaaacggtgggcctttggggagatgctgaaaagacattcctcttgtctaagccatatatagatgtgttgtggaaaaccattgatgatgcagaagagcaggaacaaaaagcacaggaaattgtaaatcaattaaataaacagcaaaataagacagctaccgagtaatcggtggctgtttttattttataaaaattcgcaaagttgtgagcgtaaaaatcaacagtgtcattcggtgtcgttgcaccgcaaaaattcgtaaagacatatcggaggtaatcaatgaaaagagaagagttaattgcaatgggtatcagtgaggaaaatgttgaaaaaatcattgctgattacggcagtgccgtacagagagaacaggcaaaagcagcagagcttaaggcaaaggcagacagcgcagatgagttgcagaaaaagctggatgaaatggaagcaggaaacctcacggaacttgaaaaagcaaacaaggcgttagagacagcaaatcagcagattgcagatatgcagaaaaaaaatgccatcagagatcagcgcgaagcattgatggaaaagttaaaaatcaatgcagagcaggcaaaaacggtcgtcaaagatgatggaagccttgattatgacgctcttggaaagattacatccgaaaaggaagccgcagcagcgcaggcaaaggaacaggagattgcgaataattctgaaaatccgggcggcggtactgcaggtggagagaataaaaaaacggcagatgttgaaaatgccgaaagtatcagctttggcgaaccggcaaaaaatgcagaagccaaagaccattatgttttataggaggtaaattatgggaaaaccgattgaaagagactttacacagagtaaaggaattttaaaattctttccttatgagggtgcggcgtgcatcgttccgcagacaatggtgccaagtgccgatgcaaacggaaagaagattgcaaaggcagggacaccgttcccaagcaatgacgaatcttgcaaagggtatcttctggaagatgttgacgtaacaatgggagatgcgcctggaacttatgtatatcagggttctattgacaacgcaaaggtaacagcgaacggagtgaccgtggaagcaactgcaaaagcagcaacaccgcgtgtcactttttttgattaagaaatggaggtattagagaatggcattaccattatcagaagcatttaccgcaagaagccttggggttatgtggaataattatgaaaaaacgcttggttctgcgccttacttaggtagacagaaatttggaaccagaaaacaggacagccttgagcttagatttatcaaaggaaaaaacggtcttccagtatccttaaaggcatccaattttgatgcgcaggcagagttaagagacgttggtggattttcggacattcagaacgagatgcctttctaccgtgaatcttacatggtaacagagcgtgaagagcaggagtatgcaaattaccagtcggcagaaaattccaacatggcaaaccaggtgcttagagaaatcagcaaaaaaccgatgatgcttattgagggggcaagagtggtgccggaacgccagatttggcagttattagcaccatctgatggtattccaagagtacaggtaacaattggcggaaagagctactatgtggattatacttcggacaatggagtggcgcacaagagagatcattacaaggatatatccggaagcgataccgataaatggtctgcatccgaaacagcaacgccacttgatgaccttatcgagattaaacgtgagtttgcaaagaaaaccggatattcccttgcacgctttagtatgaatacagaaacatgggaaatggtccttaaagcggaagatacaaagaaacaggtgcttggaattactgcttacaatggcggcattcgcttacagcaggggcaggttacagagtatcttagaggatacggcatcgagattgaagtttacgacaaactttacatcgaccctgcagacggtgccaccaaatattttattcctacaggagttatttcagcgcaggcatccggcgtgtaccttggagattatgtctttggaaagacaccggaagagagaagcggaagtttgacagacggaaacctttctattgtagaaaccggtatttcggtatatacatacgcaacaaatcatccgatcaacactcattgcgttgtgtcaatgatcggattgcctacttttgagggcatggacagcgttgttgtcatgaaagttgcgtaggaggtgcggtatgattgctgaatacacggtaaaacgcaatggaagatggtataaatcaggagatgaaatcccggacattgtttcgggagagaaatcttccggcgggtacaccaagacagagattaacagaatgagcactgctgatttacaggcacttgccgctgaacatgggattgagggtgcaggagaaatcagcggagcggaactgaaacgcattttgatcgagcagttcggattataggtagggaagaatggacgaatatacaacattagagcaggtcaaaatcagactgaaacaatttcatattgaaaccgttacggatgaagatggtgttacttctgatgttgtcgtgttcgaccagaaagaagataatccttacattgaacagcttatcaagcaggcaagaaatgaagtggtaagcaagcggaattacccggaaagctacacggatgaaaaaatatccgaagacttgaaacagtttgaggatgtaatcgtcaatttagccgtgtacgaccattcacaggcaggagaagcctatatggcaagttattcagaaaacggcgtaagccgtagctggaaagacagggaaagcttgtttgtgggagtatttccgtttgtaaaagcattataaccgtatgggattccatctggttagaagattgtgcgttacgttttgccgatgttggcaaaacgtagcaggcggcacacattgagcggtggtgggcggtgtgccataaaaaatgaaaggcggtatatgatttgacgattgaaatatcaacagcaatcattataagcgtgctgtcgcttggtttttccgtctttatgggcttgaagagcaacaaaagaacagacaacacggaacttgaagagcgcgtgagggagaacacacgcattaacatgaagttggatgccatttcaaacaacacgaccgagatcaaaaatgaagtttccgagatgcgaaaagaaatcaattctcatgacaacaggatcataaaggtggaggaaagtgtgaaatcggctcatcacagaattgacggaatagaaacccgtcttaatgatgaaaaggaggtttaatcatggatattatacaggcggtaattgctaacatgacaattattctggcgattattggtgcgctggcatttgttgtgtctgtggtaacacaggtaatcaaaggtgtaggcgtattttctaaggttccgacggacatcttggtatttgttctttccatcggtatcacggtcgctgcgtttgtggcatacatgcagtacatacagacaacaattttatggtatatgatcttggcggctattattgcaggatttattgttgcgtttgtcgcaatgtatggatgggaaaagctttctgagctgtggaagcggttcggcaaggatgtgaagtgaaatgcttgaaattaacaagcaaaaaatgaattattcgctacagagcggaaaggttccggtgtatgtgacggacgaggatggaaacatcgaatattcgtcatataccgactctgatggaaatgtaatttattaccttgatgaggatggaaacaaaataccgaaaacaaccggagagtatacaacaggttatgaaaagcctgtggttttttattcttcaatcagcaataagttgagtgaagcacttataaaagagtttggcgttgacaattcaacaaactttgttcagattgtcgaggacaaagggaaacttccattgagcgtcggctctttggtatggaaacggtcagatgtaaggtacaaagatgaagagaatacaatcgttgacgaaaattcggctgattacatcgtaaaaggtgtcgcagacgagggattgacggttgatttgttcttattgcaaaaaaatgtgaagtaggtgcggcatggggaagaaagtaatcacaatgagcctgtctgaaaagtctattcagaacgccatacgagagcttagagcctatcaaaacagattgacatataaatgtcagctattggcagaaaaactcgcggaaaagggcgtagagattgccagagtgcaaattgctgaccttgacgcaatatttacatcggaactgatttcaagtgttcatgcggaatatgaaggaagcactaagggcggcggtatatgggcggtaatagccggtacagaccatgccgcatttgttgagtttggaaccggaattgtgggacagcaaagtccttatcctgggaaactgccagagggtgtttcgtggcagtacgcaagtggaaaaactatccatcagatttcagatggaagatatggatggttttatcaggacgacaatggcgattggtggtttacagagggaatgccaagccgaccattcatgtatctgaccgcaaatgagttgcgtcagattgttacacagacagcgaaggaggtgtttggataatggcaggcaaccagtgggtatttgaccttgaaacaaacattttttccaatgtggtaacgattgccaaaccaaaactccagaagaaatacaaaagcatgaattttgaaactgcatttacaacggttgaaaagaaccttgataaagaccctgttttcccgactatttacatccatgagatgccggggcttgaacgtggggcagatttagagggcacatccgtaaatgcggtgcaggaaacaatacaggttgacgtcattacaaacacaaagcagagcgatgcaaaagggattatggctattttagctgatgcctttaagcagatgcgatttcaaatcacagcaatgccggagtttaaaaacgacagcgagaaaaaatttagaagcgttgcaaggttccggcggataatcggagccaacgacagattgatgtaaaagagccgaaaggctctattttttatgcaccgggtgcataaagatgtgcccgataaccgcattatttagcggtagaaagagaggtaaaaatggcagcagcaggattgtctacgttaggaattacgtttggctatggcacagaagcgacagccggaacaaagcctacatcatttaaacaactcacaagaattaactcgattggcggtattaacattgagccggaacagatcgacgcatccgctttagaggatgcaattaccagatatgtaaaggggcgcgcagatacaggcggttcattccctatcacggtaaaccttacagacgccacaaaagaagagtgggaagcacttatcacggcgtacaaagcgcttaccgatgggaaaagaatgtggtttgaaaccattattccaggatttgcagatgcgttttttgttgttgcgcagccaccggagcagataccgcagccggagattggtcagaatgagcttttgacggttgaaatgaaccttaccattgaggaatacaagggaatggacacggccgtggcgtttacaccgggggaataacacgtcagtcgaatagttcggttgaatcggctgacgataatcagacaaccgaatcggaacttgaggaaacagtgtaaaagaatagggcggtcttcggactgccctttccctataaaaagggagaaagggaaagaatatgacaaaattaaaatttggagagaaagaattacagattaagtttggatatgaagcaaccgtgaaaagcggaattatcaagaaagtagcaaaattaaaccagatggaagatatggaagcggttgacgaaatccttttatttctgccagagttaattcttgttggagcgcagaagttccataaagaagagcttggctataacccggacaatgaagaagaaaaggaacagcagcttggaaaagtatatgccatgctggatgattactttgacggagaagatgcagatgttcaggaactttacaatgcacttttaacagagttacttgaaaacggttttttatcaaaactgctcaaagcagagcagaaagaagcggagaagaaaactccgaggaaaaagtagaagaacagagagaacttacatggggaacatattgcacggaaatccgcccattctggcttttagttacaaaggggtacggatttactgtgcatgacatagacacgtcttgtccggctgatttaaagccatatgcggatgcttacaacttagataaaaagcaaagagacaacgatatgtggatgtggtttggaacatatggattgtcagcggtatcggtggcagtagaacattgccttgccggtaaaaaagctaaatcaaagtatatagacaagcctatcacagagcatagtttgttaaacgattctgaaatgacagaagaggaaattcagaaacaaagagaattatttgtggcaaaactcaaaattaagcaatcaaattatgagttgagccacccaaagaaagaagaggtgccacatgaaaattaaaggtattgatgtttccgggtacaatggaaatattaactggtcaaaagtagcagagaacggcgttgaatttgccattttgaaagtaatcagaaaagatttgcagccggacaagtattttgaagcaaactggacaggagcaacagaagctggcgttccagtgcagggcgtatataattacagctacgcaaccaacgcagaaaaggcacagatcgatgcgcaaagagtgatcgaagttcttgccggaagaaatgtgatggtgtggctggatgtagaggataagtgccagcagaatattggcgataagattgtctctattatcaatgaatatcagaagatcattgaagccgcagggtgcaaatttggtgtatacacgggtctgtctttttacaacagctatatcaagccatatcttgagcatattgattgcccgttttgggttgcaagatacccgtccagtacgcctatgatgattacggcggacgcaccggaagataagaagcctgatattcttcatgaactttacggatggcaatacagttcaaagggatttgtagccggtgtttccggatgcgtcgatctgaatgaactgtatgtagcggtagacacggtaaatgtcatgccggagccagaaaatacacttcataaggttggagaggaaatcacggtttcttcttactacaaatcttccacggctggtattggagatgcgatcatcaagtatgcttccggaacgattacacgaatcaaggcgggtacgcataatccatattgcttttcaaaaaatggagttgcagtaggttggtgcaacgatggagatattcgatcaacggatgcttctgtgcagtctacagataaaaagacaacgtatacagtacgacgcggcgatacactttcaaagatcgcaaaagaaaacaatgtaacggttgcaaaattgcagaaagataacgggatcaagaacccaaacaaaatttatgtagggcagaaaattttgattcagtaaaaaatcaaggacggtaaggtgtcacagcctaccgtctttttattatgcgtagaaagttggtgctgtcatggcagatattgatgaattacagataaaaattaaggctgattctgcaaaagcgagtgattccattgataaacttgcatcaagtttggatagtcttggaaaaagtctatcatttgataccagtaaactttcaaacatagcatctggaattagaagcatgtctgacgcggcaacagggtttaagggtgcaaaatcaaaagagattacatcacttgccaccgcattaaacaaattctcaaatgtagacacatcatctttctatggtatatctgcggcaatgaaaaatcttgctgcaggaatgaaagatacgaaaatgattgatgccagcggtattttaaatacggcttcggcattatcaaaaatgggcggaaaacttgccacggttggtactgataatctggtaaagattaaggacgatttggcttactttgtcaaaggaatgaacagcgtaggggcgcttaactttgatacaacaggtttgaccaatctgataggaagtatcagcagacttggtggtaagatttctacacaggcgacagccaatttgccgcaaatatcagcgcaactacagaattttgtgcgccagatgaataaaatcggcgaactgaaatttgatatgacaaacatgagtagccttgtgacgtccatatcaaggttaggaagcgttgcgagcggcagggcagtaaacaacatacctttgcttgcagataaccttaaatacctgtttgagactctttcaaaagcgcctaacgtaagcgcaaacatcatccggatgacagaagcacttgccaatttggcaaaaacaggcgcatcatccggtagagcagcaacatctctcggaaaaagtttgaacatttttagtggatctgcgaacaaggcgaagagtagcagctttagtcttgcgtcagcatttggaaaactatatgcgtcatactggctgttattccgtgctttttcaaagattaaggatgctatcgacatatcatcttctttgacagaggttgagaacgttgtacgtaccacattcggcaattatgagaagctgatacaggacttttcaaaaacatccatacaggattttggcatgtcagagttgaccgctaaacaggtggcaagccgattccaagctatgggtacagccatgggattttcacaaggaaagatggctgacatgtcgctacagcttacaaagctgactgcagatatggcttctttctacgatatggaacagtctgatgttgcaaggaacctgcaggcagtatttaccggggagacagagcctttaagaaaatacggtcttgacctcacacaggctactcttaaagagtgggctatgaaacagggactagatgccgacatttcgtctatgacgcaggcagaaaagaccatgcttcggtatcagtatgtcatggctaatacagccgcggcgcagggagactttgcgagaacagcagacacatgggcaaaccaggtaagaatacttaagcaatcatttgaacagcttgcatctatcatcggtggtgcactgattaatgcgtttaaaccgtttgtaaaaacgcttaacgcagttatgcaaaaggttattgattttgcaacgacagtaaccaatgcgttaggatcaatcttcggatggaaatttgagatttctgccggtggtttggcagatgattggtctgatgcagcagggagcgcggctgatatagcagacagcactggacaggcagcgaagaacgttgaaaagatgaataagggcttaagagcctttgacgaactgaatctgattaccactccggataattcaagcggatctggttctgttggttccggcggtggtggtgcatccggcgggggtgcgtccggtgggctggtacaggtagataccattttcaaggactatgaaagtcagatcagaagtttgcgggaacttggggcatatatcagcgatgcgttatcagatgccatggaatctattgactgggatagaatttattccaaggctagaaattttggaaaagggctggcagatttccttaatgggcttattacaccaagattgttcggagatgtcggcatgacgattgcaagtgcgcttaacacagcaatttatgcagccttgtcatttggagaagaatttgactggacaaatctgggagattccattgccgcaggagtgaatcgcttctttgaaacgtttgatttttcgtcacttggtagaacaatcaatacatgggttcatggaatatatgacactattacaacagcaattggaaatatcaagtggtcagaagtatgggatggtgtaacggattttttgagtgaaattgatcttgagacaatatctcttattattggagcatttgcacttaagtatgcaggtaaaattcttacaggtaaaattcttaaggaaacgataggaaaactgattagtgagaagtttgtggcggcgtttggacaagagtcagtaaagtcaattctttcttatgtagttccgatttcactttccgttgcagttggggcgttaacttttactattggaaaagacagtataaaaaaagatgcagaaaatctagtaaaagcatataaggatggtggatttttacaatatttgcaagaaagcttaaagcagcttataaatccgtttgagtggataaatgcatatggtgggggcattttgagtcaaaaaggaatacttgatcgttattcagacggagttgacttaaacattaagatgccgaaaaaagaagattatgcatctttagatgaataccaaaaggcactaaacgattttaacaataatgtaccagacagcctaaaagttccaagtagctttgatttaaaagcatggatagatgagtggaaacaaataaatggactagataatgtggacttaagagcagaagttgttcttccaaacttgaaagaaaaaatatctgggtttaaagacgacgtaaaagaatggtggggattagatgttgaactacccgttcgcaataaattaacaacaactttagaggatgtttcttcatggtgggaagatgtaaaagaatattggggagaaaaaaagctttcaatacagacagaaataggagaaataaaaggtaaaatagaagaaaagtggaatgaagcatctgaatacattcaagaaaatattttgccttggtttactaaagatcattggcttgaaataggaaacggaataaaagaaggtctttcgactaaatgggaggaattctctacatggtggagtgacacaggtatagccgtttggtggaacgagaaagtttctccatggtttacagaagatacatggaaaaatcttggagaaagcataagaaaaggtctatctaaaaagtgggaggaatttactggatggtgggaaaacaccggattctataagtggtggaatcaagatgttgctccaaagtttacaacagacaagtggacatttagtggtatttcagatggattaaaaaatgcatggaataatgctatagccgctgtaaagcacatatggaacggatttgcaaactggatgaactcaaagctttctttttcgtgggatgcggtaaacattgctggaaagcagattgttggagccggaagtataaatctcgggaaaattcctacttttgccgccggaggattcccaagccagtacagtatgtttatggcgggagaaaatggacgggcagaaatgctgggaactgttggagggaaaacagcggttgccggtggacaggaaattacaggtattcgagatgcagtgtacagtacggcgcaacaggaaatggaattgctaagacagcaaaatcagttgcttcaaggaattttggaaaaagaatttgggattacatcagagcagatcggaaaaagtgctcgcaattatgcaaaagattattttaacagaactggaagagaagcatatattttctaatgacaaataccgccacttgtggtagaatcattttattacaagtggcgggagggtaacacatggcgttgattaaatgtcctgaatgtggaaaagaaatttcagacaaagcagaaatgtgtatcaattgcggttttccgttaaaacaacacgaaaacaatgaaatgtctgcggggaaaagtaaattttataaatcatacgaacaagaaaacgaaaatgatagagggtgggaacgcccaaaagagccagagattacaggtgttggaaaattattcttaagaaattctgttgaaagatctcaaaacacgggatttaatggtatatataaatatactttattcggagaaaaaaaagaggtttactgtccaagatgtgggagcgaaaattgttctcattatacggagcagaaatttgtaccaggcaaaacaaagacaagatacactgcaaatctaaatccatttaaaccgtttactttagtaaataaaaaggaaaagattttgagaaaagatcaaacatatgaaataaataaaattatatgtaatgattgtggctacactttcatataaatttggatttaatatgtggagaattacgatggagaatagggagtctgaatcagaactaaatgagtgcaaaaagaagttgaataaagcacatcaaacgatagaagaattgaaaattaagatgacgcaagataaaaagaattacaaatgggaaataagagagttaaataaagaaaaagatgcattaaaggcgcacaatactgatctttttaatcgggagtcaaacgcgcttattcgtgcggacgatttggaaaaagagaatattgcattgaaaaaagagaaaaagaaattggaaataaaaatagaaaaactggaaaaagagaacgaaaacttattgaagaaaaaggatgaatgtactagggatgcagattgggaaaggctggggaaagcgggtatataagagggagcgcagagatgcgcttcttttcatttttaaattcaataggaggtatatatggaaaaacaggaaatcaagattacatatgggaacacggaagtaactcacacgtcggagaaaattttgattaaagcgcctaatattgaagtaatcacaaaatagataaagaaagaaaagcagcatctattaaattggtggtaggtgctatttttatactcatttttaggagaataatcatgaaaaaatataaaccaatagactggagcaagtgcccagaaagtcgcacaccaataggaaatccgaataattgcgtcgtggcggatattctgccggacggaaaaactgaaatcttatttttaagtcatgataacggtgttcatatttgtaaatctgaaaagacaacttgattggaggtggtcgcatggcgtacagtggatggctgttaaagattggaaattacacagtgccaatgtcttttatgaaaccggagacatacagcccgtatgtcaatatgcaggacttagatgattatacggacgctaacggatatctacatagaaatgccgtggaattaaaggcgttaaaagttgagtttgaaacaccggctatgcttacaaacacggaatttaataccattataagtaaaatacgtcagcagtttactaatgcaaccggaagagcctgctatatcacggcgtacataccggagtatgacgattatgtaacacagtatggttacatggcagattttcagcctacgatatacggaacgtatggcggtcaaatccattacaactctgtaagacttgcatttatagggggtgtatacgatggttgattaccaatattcaagcctgtttttaaaggacagcgtagacaaacagttaaacatcgtatctgatgatggaaaaatcaatatcacaaacaccgaactgcaccaagaaaaatttgaattgacagaaagcttgtgttcggaatctgaattaacattcggggcatgtgaagccgggatgattaaattcacggtgtccaatgtattcttgccaatgaaaggcaagtggttgactgcaaagatgactcttgatggtcacaaagataaaccattccaaataggaagatacaaggtttattctgacacacctacggcagatcggacgtgccgggatgtggtagcttacgatgctttgtatgatattttatcatctgatgttactgattggtacaatcagatacttccacaaaaagatagcaaggtaacgctcaaacaattcagagatagcttttttaatcattttggagtggaacaggaagaagtatctcttgtaaatgatgaaatgattattgaaaaaactgtagaagtgacagcatcaagtagcggaagttcaggtaccgcagagacaagcacgataggcgaagccatgagcggaaaagaggttttgtcttgtatacttgaaattaacggttgtatgggaaatatcgggcgatatggaaagtttcgctatgtgtacttaacacaagagatacaggggctttatccggcgaatgatctttacccggcggatgatctttaccctagaaatccaaagagcaccagcataagtaaaagccagtacatttcagcacaatatgaagattatattgtcagaacgattgacaaactgcaaattcgtgaaaaagagaatgatataggagtgattgtaggtgatggcggaaacacttatgtgatcgagggaaatttccttgtttatgggaaagggacaaaggaattaaacgaaattggagaaaaaacgttatcaaagataaaaggaattatatacagaccatttagtgctgactgcaaaggaaatccatgccttgaagccggagatgcggtacggctggctacaaaatatgaactgatcgagacttacatcctaaagcgcacgctgaaaggcatacaggctttgcgtgatgatctggaagcggacggggaagagtaccggacaagtaaggtcaacggaatacagcggagcatattgcagctgaaaggaaagagcaacacgctggaacggtcaattgaggaaacaaagtcgacaatcgttgatgtggaaaagggcttgcaatcccagatcacacagacagccacagaaatccgttcagaagtaaagaataccactgacgggttatcatcacggattacccagaatgcgagtagcattacagcagaggtaaaccgggcaacaaatgcagagggaacattatcatcaaagataacccagacagcagaaagcattactgcagaggtaaaacgggcaacagaaaaagagggacagcttgcggcggcaatacaaattaatgcagaggggatcacaagcaaagtttcccgagacagtgtcgtttcggaaattaaccagtcagcagagggactaaagattagagctgatttgttggaactcaggggatctgtggagatgaccggcgggtatgtgcacattgacgcgacagagagtacggacaacttggttgaattgaaacgggaaggcactcttgtgcagatgggaacagatggattgaagtcagtagcagatacgagggaactcacagccagctattcggcagtagcagtgcgtgatacatcagccaatacgattgcacagatgttgtcgaccggaaaaggaatctcatcctacgggtgggaatcttattcggacaagcgactaaaacacggtatagaatctcttgatcgggaaaaaagcgcagcgcttatacagtctctgcgtccgtgccgctttatttataactatgacgccgcgggacattaccggcatggtctgattgcacaggaggtactgactgcgattggagatgaagactgggcgatctgctccgagaatccagatccggatggcaatacctattatgcgcttgacaaaacggaactgatcgctgatctgatcgctgcagtacagttacagcaagaggcactagaagaattaaaaaagaaagtagaatgagaaaatggtcaatgcaaaaattcgtgagtttgagaatgacattatcaattttatcaatgcaagtgttgatattccgattgaggttaagcatctggtacttaaggatattttgcaccaggtagaagcggaagcaaaccggcacgttatcgccgagcgggagcagatgcaggaaaatcttaaaaaggagagtgaggatcatgaataaagcatataaacgtatcaactgggagaattacccgagcgatgctacgcctttgaatgaagcgaatctcaacaatctggacagtgccacagataccattgacgaccgtgtgattacgcttgacacaaccaaggtagcaaaaacagaggttgctacacttgtatcagatgtgacatttgaggaatctactggaattattaccattacgaagaaaaatggctctagggttacgattgacacacagatggagaaaattgctgtcaactttacttataacccgactacacagcagattatactcgcgctgattgacggcacgaagcagtacatagatttgtcgacgctgattacgcagtatgagtttcttgatacggataccgtggcttttaccattggcacggatggtaaggtgtcggcaatcgtgaaagaaggaagcatcgaggaaaaacacttagagccaaattatcttgccaagattaaggtggaagcggcaaaggcagaaacaagccaggcagatgcggcggcgagtgcaaccaaggcggagagttacgccgtcggaggtactggaagccgggagggagaggacacggataacgcggcgtattactaccggcaggcgaaaagcatatcagaatcttttgcaggagcattgcgtccgatgggtaccgttgcgtttgccaacttacccgcattaaccgatgcgactgccggggatatgtacaatatttctgacgaatttacgaccacggacgatttcaaggagggatccggcaatgcagttcctgccggtgcaaatatctacaagacatcagacggcaagtgggatgtgctggcgggcaccccggtgacgggtgttaagggggcaaaggagaatgtctaccgccgtgggaatgtaagtctgtcggcggcaaacattggggcagtagcgacagggggagatacagcgagcaatgtcgcatcatttacgagcagtgatgatgaaacagcgtcatcgtggacaagcgttgttacattgacaagtggcgaaaaacattcgtccatttttgccaaggtatcgcagatgtttaaaaacgtgcggtatctgtataagatgcttggaactacggatatttccggtatcggcggcggaaccgtaaccggggcgattgtatcgcaaaatataattctgggaactaaaggaggaagtattggatatgcatctgattgttctcttgaaagtgcagttaatcaatttattagtgatatggcaccgtatgttccgtatctgatacatggggacaatatcggtggggttccagtagatggtacgcctaatgatgtcaccattgaagtaattgtattgaataaattaacaaatgcatatcggatcgttctctacaataataagggaactgatatacatactatttgccgaattgacggtggctggaaatcctgggtgcaaatagcttaacaggatttaggttggcacaaacctgcataagcagtgttttatatctgttcaaaacccagacgtttttgttgacccaaagtgacaaatcagacgatttatgtcgaaacttgcgaacgaaatgatttgaataatgctggcaaaatttgtaaaataaaattgtccgataagggcacttcaagttctggagagagggcgatgtttggcgattcattgccctctcaaatgttactggtaaataatggtaatttttttgtatgaggttgactgcaaagaacgtacgttctataatgacattaacattatcggttgcagagattggaggagaataaaatgggggaagacaaagagaaaaatgttgcagattttagcgaggaagaatataaaaaatacatatttgaaatgatttccaaaatggataaaacacgattgaggttttattacagacttattagcggcatggaaaaagaacgggattaaccgttcttttttggattatctttatttgaaagagattctacaatactgtcaacggaatctttctcacgttcattcaaattcatataataagacaaaagtctttttattctattaacatcattacttcttgatatttctacaaacaaatcagccatatcatcagaatacggagagttttgctcttctccagtcataagataatcaagtgttactccaaagtaatcagctatcttctgtaatttgtcttgttttggagcacttctgccagttttccaatcagtaaaagtagaaccggctattccagttgcttttccaaccttgtatgcagatacgcctttttcttcaagcagtttcaaaaatatttcgtacatattccctccaaataaaaaatagttatgaaatcataaataaaaatgcttgacaaatagactatggaagtatactatataaccatagttatgaaatcataaatagtttttaataaaacggttgcgatttcataattaaaaaaatggaaccgtttattttttcttgaccgaaacatattataacggatttcctaactatttgcaataaaaagttagaatattttaaaaactgtaagagccgattgctcggctcttacagaattagcggaaattttctggataattattccgcaaggagcattgttcacacgaaccaccgtattttacatagttacattgaacagtaccctttaagtaacttccatctccggcatctatgcaattaagaacaacggagtaggttatcttttgtgtctggcaatagccagttatggtgcgataagcattcatgattatcacctccattcacaaaatgttacaagaaaattatatagaatattctaactaatttcaagggaaaggagtgtttaaatgtatcagaagtttgaacagcttgtaaaggcaagaggaatttctacatacagagttgcaaaagatattggtcttgcgcctacagtattttcagattggaaatctggaaagagcaagccaaagacagacaagctgaaaaagattgcggattacttcggggttacgattgagtattttcttgagtagaaaggagaagaatgtcgcatagcattgaagaagtaaaagataccctataccagcaaatcgaaacgctggcagaggaaagtaagaaaacatcagatacggaaacaaaaattcgcattgcaggcgaaatcgaccgtatcgctgaaacgattattgggattgatgccgattgagtattgattcgatgctagatatgtttctttcgatagattttagctctgaaagatttttaatgctttttaaattacttaatttatgaacagcacaacaatcagaactggaaacataccaagcacaatcgcggatgcaatctctaaaatcgttaagtggacatttgttaatggttaccacctccttatggaggattataacacggaaaggagttggatggaatggacgagttagtgaaagtcaattttgatacacagacagtatcggcaagagaactgcacgagcagttacatattggaacaagatttaacgattggtttccacgtatgacagaatatggatttgtagagggaacagacttttactcaaaaatgagtaaaaccgataatggtggcagaccatcaacagattacgaaatttctgtagacatggcaaagcaaatttgcatgatacagagaacaccagagggcaaagcagtccgccagtaccttatcgacttggaaaaggcgtggaacacaccagagcaggtatttgccagagcgttaaagatggctgacgagaaaatcaacagccttaaggaaatcaacaccagtctgattgctgaaaataagaggatgaaaccgaaagaaatctttgccgatgctgtagcaacaagccacacatcaattcttatcggagacttggcaaagctgatttgccagaacggctatcagataggacagaagcggttgtttgagtggttgcgtgagaataacttccttattaaaagcggttcgtcaaagaatatgccacagcagagatatgttgaacaggggttattcgaggtaaaggaaagcaacgtgcagaatccggatggatcagtaaggatcactcggacaaccaaggtaaccggaaaaggtcagatatacttcgtcaacaagttcttggaaagaggttgcgctgatgaagaatagcatggcaaactggtagtttccaacaaaaatatgaaattggaaagattaacaggaggaattcatggataaacaaacgaatattgctttaagaaaaacattagatcagatcggcgcaagccattcgctcaaaggatacacatacacaattagagcgatagagaaatgtctggacgacagggatgcgcttagatgtgttatgaaggaaatttatgcaaaaatcgcagaagagaacggaactaccgcatccaaagtagaaagaaacatccggaacttaatagaggtcacatggataaatggcaatgtgaatgcgatcaatgagatttttggttatacggtttcgacgaaaaaggggaagccaaccaattcagaatttattgcggtaataacagattttgtgtccttgcacgggcaggaaattgaaagtgattcttataagtggcgggagtgaagtgcgtatgaagaagttggcaatggtgattgaatttgtaggcgcggcgatcttttttctttgtatgtgtgcggatgcaacggaaaatcctattgtagcgataccgaccataatcagcttactcttattgtatgccggatcaagaattgaaggaggatggcaggatgcggaagagattgtcgaagatcatgattattatgttgatggtgatgacactgacgatggtattacctacattacatacgacagcaacggaaccgagcaatacatggatttcaaatgagtatcttccttatataaaggagatttcaaacgaatatcatatttgcccggaaatggtaatggcgatcatcgagcatgaaagcagtggacaagccgatgtggagaatggtggatgcaaaggtctcatgcaaatttatgaaaaatatcacagagaccggatggaacgtcttggagtagaagatctctatgatccgtatgggaatattctcgtaggatgcgattatttggcggagctgtttgagaaatatgagggagacatgagtacagtccttatgatctatagcggaacatcagatgcgttgaccagaacatacgagaatcgcactgaatatgccaaaagcataatgaacaggacggttgaacttgaaagacttcatgaagaaacggaatcatccgaaccgaccaaagctgaatgattcacaatcaaagcaatagcataagctatttgcgcctattttagcacgagtagaaaggaaaagcaaatatgaatgaaattacaaataataaagtgaagttgaccggaacagtcgtttccgaaccggagtttatttatgaagtatatggagaacagtttttcaatctgtttctcgaagtaaagagaatcagcggtgttgcagatatagttccgttgaccatttcagagagattattcaacctcgaagacaaatttacaggaaccgtggttagagtttctggacagttccgatcatttaacaagcatgaggaaaacaaaaaccgtttagtgttgtctgtttttgtcagagagattgaaagagttgtgaatgactacgacgaagaaaacgagattgagattgacggatttgtatgtaaggatccggtatatcgtaagacaccgcttggtagagagatcgcagatattttgtttgctgtaaatcgttcctatggcaaatcagattatataccatgcattgtctggggcagaaatgcggtgtatacatctggacttccggttggaacgcatttgaaacttaccggacgcattcagagccgtgggtatgtaaagatgtacgaagatggaacagaagaacagagaacagcatacgaggtgtctgtaagcaaaatcaatgtattagaggaggaaaattaagatggcagaaaataccgttacaatttccgttgaagaatatgcagatctggttgcatgcaggacgaaagttcatacagcatgtgccattattgcaaatgagcaccaaagagacattgagctgatgggaaaaaaaggaacaactattgattcaaaaattatagagtcagctcttggatatgttgacgatgaagcatgctttgaagaggcacttaaaaaatataaagagtggaaggagaaagaaaatgaaactgaaaattagatcgttacatatggagaatttcaagggaattaagagccttgatgtgaatttctctaataagacaagtattaaaggacagaacgccgcaggaaaaacaactatctttgatgcgtttacatggcttctgtttaataagaacagtgccggagaggaaaagtttaatgtacgaccactgaacgaaggaatacgagttgataatgtggagatcaaggtgtctgccattctggatgtagatggaaaggaagttgaactttccaagacacagaaacagaactgggttaagaagcgtggaaccgatacggcagtattgcaggggaatgttaattcgtttgagattgacggctatccgaagagtgaagcggatttcaaggcttatgtttcggaattggcacagagcgaggaaatgttcaaaatgctgactaatccgcagtatttttcttctttgaaatggaaagaccagagagatattctgatgaaacttgtttcagaggtttcagatgtagagctggcacagacggacgcaaagtatgcaccattgctttcggaattggaaaaagcaccgtctacggatgatattagagcaaaattctccaaagcattgaacgagtggaagaagaagcaggcagagattccagtacgaattgacgaagccatgaaatccaaggttgacatcgatgttgcagaacaggaacttgcgaaaacagacttggaaaccaaaattgcagatattgatgcgaagatcaaagattctgacggagtaatgatggagttagggcgtgaagaaatgcagctgcagtttgatatgtctggcattatgcagatcatgaaccgggatctgacaaacagaagaagcgagatcgaagcagaattacgcgatttgcaaaacgagataaagcgatttgcagatactattgctttgaaagagagacgggtttcagaaaacgagacggttatttccaatgctgattcagagcggaaaaggcttggagaggagtacaacgcagaaacagcaaaggcttttgatgaattcccatatctgtttgatgaatcaaagtgggtatttgatgaaaacagcaccgtttgctcattgtgtggtcagaagttgccggaagataaaatcgagcagttaaaggctgattttgaaagcagaaagcgaaaagccaagtcggatgcagaagaaaagttaaaatcagaaaagatcagatttgacacagaaaagagaacagcactgaacagattggttgatattggcacagagagaaaaaatcttatcacaaaattaagggatgaaaatgccaaagcaaaggaagaaataaagtccttaaaggaacaggagcaggaagatattgcaaaaaaagaaaagctatgccagcaattatcatcgattccggaaattgccgattatttgcataatgaagagtacgtggggttgaaagcaaggcatgacgaaattctggcagaaattgaaaggatgaacgccaatggagaggatgtagcagtcgaagcactcaatcatgaaaagaaagagttacaggaacgtctttatgatgtaaacaaaatcattgcaaaggcatctatgaatgttgagattgacgagcgtatttccgagttgcagacagagcagaaagagatcgggcagaaagttgccgatcaggaacacattctttacctgttggaagagtttattcgtttcaaactcaacaaggtttctgaatcaatcaacagtcacttcaagaccgtaaagttcaagcttttcgatatgcagttaaacggaggtatgaaagattgctgcgagtgtaccgtgggtggtgtcccatattcatctttgaacagcggacataaaattgtagccgggcttgacattattcggtctcttagcgagttatacggcgtgagtgccccaatttttgttgataatgcggagagtttgactagcgagcaaacaatgagatcgcagttaatattgcttatagcaaaaaaaccgcaatatatggatgaacacggcgaggtacatgatattgatgataattatgatccaacgatacacaaacttgtatatgatggttcgttgaaggtggagggagtttagatgggagagagtattaaaacatacaaaggatttaacaaaaatatgacttatcgtggctttcagtacgaagaaggaaaagagtatgaggaagaaatcgtagaagtttgcgatcatggatttcacgcttgcgagtatccgcttgattgcttgaattattattatccaaatgaaagcgtataccacgaggtagagcagagcggagaaatccagaaacataatgatgatactaaggtagcatctgcaaaaattaagatcggagcagaaattagcattgcgggtcttgttaaagctgcaatcgaatatacagtaaaacgtgtaaaaaaggacgctgaaagcgatgaaaagcatggagcatcctcggaaaccggagactatggagcatcctcggaaaccggagactatggagcatcctcggcaaccggagactatggagcatcctcggcaaccggagactatggagcatcctcggtccacgaaagtcttttgaatatattcggttgtataatcaatctgttcctgtctgctccattctttcggcagggaaaattcaaatgagcgtccaagctgtgcatctgcatttttttctatcttcaatacctcattccatagacgctgtttctgaaatgtgattttaaacttttccagtgcggcatctttatcatccgctcttttataacggatagactgttgaaacctttttatattttcttccggtacatgcagccattcaggaggtgcattttcgcacatcatcagactggtgtagacgacttcctttttggaagtatagtaactgattctgcctgtttcctcattcttcatcacatctccattaagatatgccgatgcggatatgacagattttcctttactgcgcccgacaatctttactgtaaagtgaaatatcgccatgatacgattccccctttctgccgtatccggcattgatttccgacagcatcttcttctggtttggcagaagtgaagctgtcggaacgccctctgcgcaagagtgccccctgcggcatgagcaggtctggctgaaagccccgccgacggaacgagcccggcaagcgtaagcgcagaccggttgccacttgtggcaaacttataaggacgacctctggttgtccataagtgcgcccttcattcaaaggcaatgaagggaatggaaaaaccactccctccgccattacacttcctccatatctgtaagtggctctttctgcatcgcctttgagaaaaactttccgtttgtttcctgcctttttaagaagcctatcaactttggtaaatcttcctcctcaatcggacagccaagaaccgattccacgaacgcacttctctgaacgtccatttcaaagcacccacggacgattatgtaaaaatgtttgagcagatggaacaagacggcgtgatctccaccagaggtctgaaaccggatgccgtcaaatacggtgagttggtatttgatgtgaattccgcttatttctacaatcatggcggctatgaatttgcgaaacagttttatgccgatgcctacaaagctgctgcggagatcgtaggtggtgagcagtatatcctctccgctgtgatgcacgccgatgagcgcaaccgagcaatgtccgaagctttgggcgaagatgtgtaccactaccaccttcatgtggtttatatcccggtggtggaaaagcagatcctttggtcgaagcgatgcaaggatgaagccctccggggaaccgttaaggaggtcatcacacaggtcagccgcagtaagaaatgggagtccaagccggtgcttgtgaagccctccggggaaccgttaaggaggtcatcacacaggtcagccgcagtaagaaatgggagtccaagccggtgcttgacgaggacggtaatccaatgttgaacgcaagaggaaaaaagattttgaggtcatcctacagtgtgttgcaggatgacttttttcatttcatgcgagttgccggatataccgatctggagcgtggagaacgtggaagcaccgaggaacatctgactgtgacccagttcaaggtgcaggcagaacagcagcggctggaagctgtgaccgggcaggtgacacaggccgagcagagcttagcgcatgccaaagctgccacggagaagcagaaaaagaaactggaagctctgaaaaaggaaactcaggctgctaagtctgttgctatgactgcacatgagattgagtcgatgggcaagaaaaatcccattacgggaaatgttaccatgacggcggatgagtgccgcacgctaaaggattatgcggtcagtagctttgcggaaaagtctgagaagctgaaatacaagcagaaattcgagcaggcagataaaaacgcaaagatatggaaagaccgttttgaaaaactgaacaaagactatgaggagctgaaacagaaagcccagcctttcctggatgcgattgagattgcatctgaaaaggtctgggcttttatcaatgccatcctcgccaggggaaaggaactgtatgaacacaaacaccctgcccgcaatcgtggacaggacatggaaatttaagaaaggaactatttgcctatgaagaaaaccgtagatgaaattaacaagatgattatggaagatgccccgatggaagaaatcaacgatgccatcggctatattgatatttgctcctgcttcgatccgatttttgagccgcctattgattttctggaagaatgccgcaagcgttgggaagcggcacagtcctctttctgcaaaaccattgagtgcaagatcggaaacacatggtatgtgattgaaacggagtgtgacggaaatgagccacttaccgacaaggtaaaacggctcattttttctgacaagggggtgatttgttaatgactgcgacacaaaagcatgatataattccaatatgcacaacggtactgtcggctgaccaaccaccgaaggaggatattatgttggatcagcagaaaattaccattctctattgccgtctgagcaacgaggatgctcaggaaggcgagagtaacagtatcgcaaatcagagagagtatttaacccgatatgcccgtgaccacgggtatacaaacctgaaaattctggtggatgacggttatacggggacgaacttcaatcgtcccggtgtgcaggaaggctttgagcttgtcaagcaggggcttgtgggctgctggctggtcaaagacctcagccgctttggtcgtgactatctgactgttggacaatatacggatattatctttccgagttatgatgtccgctttatcgctataaatgatggcgtagacagcaaccggggagacagcgagggcttcgccgcaatccgtaatctgttcaacgagtggtatccccgtgataccagcaagaaagtccgtgtcagtttgcggcagagaggaaccagtgggaagcacatgggcaaaccgccctacggataccgctgtgacccggaggacaaggatcactggattctggatgaagaagcggctccggtagtcaagctcatcttcgacctttgcattgacggcaaaggcccggagcagattgcaaggattctggaagaaaagcagattctgaccgcaaaggcactctatgccaagcgaaagaaaaagccgatgccggaaagaccgtaccactggggcaaccagtccattgtagggattttggaacggcaggagtacacaggctgtacctgcaacttcaagacttattccaagtcctacaagctgaaaaagcggattcccaatgagccggagaatatgttttatctgccggacacacaggaagcgattgtatctcaggcacagtttgacagggtgcaggaactgaggaaaaacaaacgccgccccgcaaaagcggaacggcagggattgttctccgggcttctgttttgtgccgattgcggcggcaagctccactttgccacaagcaaaagctttgagggcaagcaggatcactacgtctgcaacaactacaagagcaaccgtggtacttgtactgcccactatatccgggaagatgtgcttcgtgaaatcgttctggaacgcatccgggcagtcaatgagtatatccgaagcgatgtggacggttttcaggaggaatggctgcaatgccgcaggactgaccaggatcgcagcatccgggatgacaaaaagaagctggaacaggcaaagaaacgccttgccgatctggatgtcatcatcgcccggctgtacgaggactatgttcttggaaatctcaatcaggacagatacagaaagatgtctgcggactatgaagcggagcaggaacggttaaagctcgaaattgaagttatcgaagaatgggtggaacagcgggaagaaatgaacgacggtctggatgcctttatcgccctgacacagaaatatgtggatgtggaggagctgacacagaccatcgtgaacgagtatatcaagaaaatcatcgtctatgccccggacaaatccagcggcaagcgcaagcagaaagtgaagattttcttcaacttcgtggacgatgtagatattcccgttatttccgagcctatcatcacgcaaacaacctatgaacacagaaaaacggcgtgaccttcgggtcacaccgttctctgcgacaaaatagttacttgtcactattaagccttgattttccgggctttttgaaccattttgatatagtctgagcagtcgattatctcttgctgaactgcggagcgcgacgagctgccttgagaccgtattcacctgaccttgatcccaaaagtccagtattcatgcggtttttcgggcttccctctctcagtaaacccataggtaaacccacgaaatcgcgaaatttttggtgccgtttaacgcagcccgaatgcagcattcacaacgctgcttaattcctcaggtttattatacttgactttcgcatagatgtccatagtcgttttgctgttctcatggcctgccagatactgcaccgtcttaggatcaacacctttgtaaatcagattggtgatgtaggtgtgccgcagcatgtgcggagtcaccttgaagtccatcgtatacaccagcttgggattgttcggctgatgctcaccaagccttggctttattctatgcttgatggactgtccatttacataggtgtaataacagcgttctgcggtagaacggactgttatgtacttccagaccctcacaaactgtgtttccgtcaaaacagttccctttgaattggagatcacatattccgattctgttttttcctttgcttccttgagacaggctaccaggcatttgggaatcggaacatctcgcttcgctgccggagtcttcaaaagtgtgttgactactggcgcaccaccttccacatgccatgcacgccttactgaaatgtacggcgttttttcatccaggaatacgcagtcccattttaatccaaggatctcttctctacgcaatcccgcgtacaagccgatcatcacgaagacatacggtggaagctcacgaatgctatccagcaaaatggcagtctgttcatccgtcaaagcctcgcgccgtttcgcaggctttccgcctcttgcacaaatcgttttggatggattctctttgatcaccttgctctcttctgccgaattaaaaatgttcttaatcagcatattgagctggccatacattccggaagaaccttttgatagcggaaccatcagcagccgcaggtcatctgtggtcacctcatccatatacatctgtccaatcgaccccacgatgtaccgattcaccatccgctcgtatccctccaacgtattggttcttaccgttccagaccgcatcagcagccatttttcgcagtactcttccacggtcggattctctctgtggaaaaccacttctgcaattttcttctgggcatcttccacccggtcatataattcttcgcgtgtcagcccataaatcgccactctctttccgtctgcatctgtaatccgggtgcggtaatactgtacccctttcatcatcactgttccgtattccggaagttcagcagggcgctttttccctttagccatgtgttctcctcctcgtctatgttcatacattgggtgttgctactcttattatcatggcgtacaccacttccttcaaggatgtcgaatgtatgtaaaaagggcagggatttttgaccatccctgccccaagttttttctgatttactcttaatcccacgatgcaaaagcatcttccagcactcctgcgagctgctctgggcgattatacttcaccttggcgtaaatatccatggtgattttgctgctttcatgaccggcaagatactgaactgtcttcgggtcaaccgaagcatgaatcagattcgtaatataggtgtgccgcagctgatgcggagtcacctcaaagtccagactgtaaaccacatttccattgtgtgctgccttttgccccagaaccggcttcaccgtatgctttaccctcttgccatcttcatagcgataatagcagcgttccttggtggtacgggttacgatatactgccataatctcttgaattgcgtataggacaacgggtctccatcccggtttgcaaccacataatccgatgtcgatgtcttcttcgcctctttcagacattccagaagattgtccggcagagggacattccgatgcgctgcctttgttttcagctctgtcagaatcaccggacgattatgctccgtatgccaggctctccgaacggtaaggtacggagcctcgcaatcaagatacaccgaatcccattgaagtccgaggatttcttctctccgcaatcctgcgtacagccccagcatcacaaatacatacggcggcaagccgtaaatggcatccagcagcttatccacctgctcatccgtaagcgggaggcgttccttctggggaattcctcccacattcttcttcagatagatggtcgggttctcatcaatgatcttgctctccattgctgccgtaaaaatacacttatatataacgctcaccgatttgtacacggatgccgacttttttgatgccgccagcagtgccaggcgaatgtcatctgctgttacatctcccaaatgcatatcgcccaatggcttaatgatgtagttcttcactttcgatgtatagtcaatcagcgttgtcatcctgatctgtgccgactgcatcagcagccatttctcgcaatactcctccactgtaggtgtactgcggcgatacgtcttgttctcaatctgctggatcgcttcctgttccttctggtacagttcctctctcgttcttgcatataaggaaacccgccgcccctgctgatctgttacacgggttcgataatactgcgttcccttcatactcaccgtaccataatcgggaagcatcattcttcttgccgccatatcattacctccaattctgttgttgctttcattattgcggattcatcgtccatactcaacgatgtcgattttcaccgccgaaagcttcgaggtttgcgatatgtcgcagcacgttccatcggttttgcacggtgtgtacattttgcaatgtactcctgaatccccacttccgtgaaataaacgcagccattttccacatactgaacataggagatcaaaccgtctgttcttgcagcatccagtgtttttacgctgattcccagtatactggctgcttccttccttgtaatcagtttatccatcgccttcttcgccatcctttcggcatttgccctgtctttttttctctgactgttccggaatgtaataaccaagctgaatccttacagcttcatcaatcccacgcatctgccccttacttacccgcccaagatagcgaatcacgcatatcttgtcgcaggtgtcgagctgttctgccaataccatagacggttttgccagtccctttgctttacggagaaagaaatgcgttggctgctttcgcttcttctcaattttcgatgtcagcggagcaattgtgatcgtcggtgaataataattgccgacatcattctgaagaaccacaacaggacgaacaccgccctgctttgatccgaccggaacaccgagattggcgagatataaatcacctcgccgataaacccaattttctttcatttgctgttgtctccaatctccatacactgatatggataaagcctgccaggtatcatgctgatacagcacccggcagtactttctgaaaatatggtttctctgtactttttcttattaccccagagatgtaggatttctcacaggcggcagtgtgcttcactgctccattggaatttaaccatcccgccttccttatggccggaccgcgaattacggaagtatcattgtccctgtctggctttaacaccgccgccggttgcaatccggcatttgcttctgcgaaaccgctatcgccccgatgggcttcatggcgtgcagtcgaaggcttgaccaaacaggaatgtacctgaagaatgagtattcagttttcaagggacatccggactttcgtccttacaaagtaagtttaacaagaatcctccggtttcgcgttggcctcgtaggcgcactttggttgtccttgcaggactacatacggttcgttttgactttttcagtgttctatacagccagattgaggcaaaaaaataccccgttggtttcccaacgaggcatcaaagacgattctattctgttttctgtaaactggtacccgtttatctcctggtgaccatttgagtcacggctaatgtatcaaaaaagcaacgctcatctcagcaaatcagacaagctgtattctcctttggggatattggctgttctgcgatactcttttatggctttcaccaagagctgaggattactgaaatactgcttcacaaaatcatacgacttcacatcatgcatccgaagatttgttttacaaaattcgcttggtttttttccagaacgcttaaactgatcatatgctccttccgcatgaataatcagcatttcaatttctggagcagtaatgacatttaccacgtcaattttctgctcatatgctttactcaatcgaaattcctctctacgagaatccaaaatccgtatcaccgaaatctgctcatcgaatcctttccgtaagtatcgctcctcgaatcgtttagcacttctgcaacggataacacgttcttccaacatttcttctctgttgaaaatcagaagatcattatcaaccagtatgtcgataatagcttcttcggcagagccttcacatatacacgccttgtattttgctaattccattctgccgcctccttaattgattgaagcagccaggcttttcttcaagcgcatatacgcttcatatgctggcgttgttccctcaaggaagccgctctggtaagcatcactctttttaatatcattacgtttcaatatatagctcagattttctgctgtaatgccattacggtttctaacgatacaaattccgtcatttcggtcatattcgtccagcagttccggataatgcgtagtgaaaataagcgttccgccatttttgttcagtcggctgtccataaagaagcgcactaaggtcgttacaatttccttgttgaaatgattctctatttcatctaccagaagataaccacctgaatgaagaacttcctttaccatcgagaatgtaataatacccttaatcgtaccagaggacagatactgctcaaggtctgccgcattattcaggataatctcttcttcatccttaaacttcaagtggataaatgtttttccctctgtctgctcaaaacacaatttctcaatggtcggatcgagaaatgcaattacctccaatggaatatcttcggtaaatggaagcacattcacattcgtataggaaagcaggctgaatatttccactgtatcattcgcttttttattatgtgcaatgacaaagctgacatcatcagaaaggtatgcttcatcgctattgcgctgctctacaggcttcattcctgtaaaatctgtcagatactttttcgacttaacggttgcaatcggtttttcccaaaggctttcagacagaatcgaatacacatattcccctgttttcgacttctttgccgcaattacagtttccaagcagcagacgtagctacgcttatcataaaaatatgtgcggattgtaacattcttcgctccgccaagaatgctttttgcctccacatgattgatgggctcatttttcacaatatttaaggccaagctaatgacctttaataccgaggtcttgccagatgcgttaattccaatgaaagcacaggcagagtggagatagtagttatccgtcaaacggtaaagattatctttgtcctcttcgcaaacacgttgctgcgtataaaagcaaatatccaagtcttttttgaataatgggagtccttgtgcggtgatgcggagtattttcataggtagtcctcctttaaaaacagttttttcgtttttattttcttataatcttattatacgccgcaaatcagaaaatatcaacggattttccgtttttattttctgatttgtttttgacactaaaaagtatccgttcaatatggcaagccctgtgattgctgacccgttccaccgcatgaaatgcatggagcgtcatggaagcggcctacgcaaaatcgtcagggaaaccgaaaagccgcctggatatacagcggcatataatccgaaaattttctcaacggcaacagatttcagagtcatcttgaaaaatgtaaattaccaacttagtcagaaaaacttagtcaatgaccaagttagtgagcaagataaatcgccggacatcccacacacagttttaaatctttgtatccaccttattgcccacggcagtgagggtgctcaaatcactcatgctcactctatcatgggtacagccaatgataagtcctatgacgcaacccatgatacaacccatgataacttagaggatgacacccatcaaggtatccaccaagatagccaccatgattctacgccgtcagcagttatattgcgcctaatgctttttagattttcttcgcaatcgtaaacagctccgaaataatactaagaagatcatttttgacttcctctttgcttggctcgctgcccatcagaagataatccgtgctgacatggaggatgcaggacagttcaatcagcaagtcaatagagcagctgcgttcaccgttctccatgcggctgacatgctgcttgcttgccaggcccaggcgaaccgccagttcctcctgcgtaatgccacgggaagtgcgaacatcgtgaagtctcttaccaaactcttttgcgtcaaaatacatacgtttctccttccgcacagccggtacagaaccggatcgacggaaggtcaaaaatagagccgcatgacggtgaagaaaaaatcctgtgccgataaaacagaacatgggtatcccataattctgtctcatgcggcattcggaagacttcgcctgtcagcggctccacagcacagctatgacttataaaattgtgttaatagggttatttattgtcatctcaaccattcaaagacgaatagtagagctgcaatctccgtaatcttctcatctccaaaacattgaagacggtctcgcgtccgcaggccttacatttggtctgcacatgtcctctggtatcctcaaagacgatgattgaattgtgtcggcaataagggcacctgacaatcctgggcttttgcgaagcaatcgcatcctttgcccggatgattttaatctgcatttccgcagatggttccgatactctgatattcctgctcatggccacacctccaatggatcacgatattcataatcctttttccggttcagatagcccagttgttccaatcggatagcagctgccgatctcgaaacgccaaagacaccacagaaagtatctatcttcacctggtctttgttataaaaacgccatccataacatgtcagaggctttctgctgttgatgaaccacatcgcccgatccacttctgactggggcatcaggatggcagctcccaacgaattggcctgccactcgttccaatcttcctgcgttctcaggatgcgggagccatttccccgcacttccggtctcttatggcaggctatctttcggtcatcggcatccagctgaaacaatatctggtgagcacactcatgtgccagcgtaaacctgcgttttccgcagagtttccggatattcgccggttcaatgaagctcttatccaggaccacatcattggttttcagaaagatgcttctctgacttccatcgacttctatctgatattccgtatccacatacgcggtcagaccatagatgctaccgtccgaggatagtttttgaaatgacaccttcaagttcagataatcggatgcaaactggtcaatgggtgtcggaagcgcgaatcttgccggatcatctgcttcgctgccgaaaaaggacttttgaaaatctcttatcactgcaacagcgatttcttctatctttttctgtgaaaggatcataggcacggctcctttgcttcaacgaaccatttttcatcttcgttgtacaggaaactctcatgcccaccgatcatgaccgtataacggattccgcagccacccacctttgtggaagccgcccgacacttatgcttcaatcggtcgatctcatacacccgtccgtcaacccatcgaatcaggcgcggacggatatttccctccgcatccacatccaagttcacaggtacatatacttttctacatttctgttccgacatattctacgctcctcctctgtaaaccggcgaatgtgttgacttcttttagaaaagaactcaccagattctaccggtgctgtattaaccaatcattcctgtcggcataagcaaatccacttttcgctctgtcggcatcttgcttttctgaaaaagtaccccatttttaatcgcatctttcccgaatcggaatcgaatctgctcaatcgctgcatccagccgttcctggcgatccagtgatttcatatcggtgaataagtcgtattgtatcggacaatcctcttcaaacaggttgattgcccgagctgtcaccgaacgaatcgggtgttcccactgataattcttatcaaacagagcaaatgcggttttcgccagataggtggggctttgtgtcggaatactaatccggcactgccactccttcgtgaaaagctcattgttgcggatggaaatcgcaattccgccagctttcttcttatgtattcgtagcttggttccgatttcctgcaccagttccagtatgatgcaccagacttcggcgttattctccaaatcctgcatggtcgttatcccgtgcccaatgctctttaccggagagacataatcggaacgcataaccggtgaatcatccagtccattggcatatttcttaatcaccagtccattcttcccaaggcggcatttcaggaaatcatccgatgttgcagcgagttctccaatggtatgaatcccataactggatagaaccttctcggtcgctctgccgactccaagcaagtcagaggcaggatgacaccaaatcttctcccggaatgaatctgcttcgatgcaggtaatcgcatccggctttttcatatccgacccaagcttggcaaaaatcttattgaagctcactcctgcggaaatcgtaagtcccagttcaaacttaaccgttctacgaatctcatctgcgatttcaaatccggttcccatacagccgcttccggtcacatccagccagcattcgtccatcccatacggctcgatctgatcggtatagcgaccgtatatttcacgagccagctttgaaaacttcatatattgctcatagtgcggctccacgatcacaagatcctggcacttctgctttgcttgccagattgcctctcccgtggaaacgccaaacgcctttgctgcatagttcttcgcaagtacgatgccatgccgttcctccacagaaccgcacactgccaccggcttgttcttcagttccgggttcagcatacactcgacagaggcatagaaattattcatatcacaatgaagaatcaccctttgcatcccgtattcctcctctccgttcgtgaaagcacgaacaacttttcacgaacacattgacacacagcatttcttgtgatactataattacacgaattgtatttcgtgttttcatcgtcattatagcaagcacagtttttcgtgtcaatagatttttatgaaaaagtgttcgtgttcgttatcaaataagaaagaggtatttctatggtcttcaaagaaaggttgaaagaaaaaagaacagaagccaatttaactcaggtagaacttgcagagaaggccggtgtaaccgcccgcacaattcagaattatgagcttggcagccgcaaaccatccaatatggttacgatccagaagattgcggatgcgctgaatactactactgagtacctgctgggaagcagcggcacctatgtcgtagaagctcacgaaaaaggcggcgcaaaagcagcgaaagatattgaagaactggtcagcgaagtgaccggtatgttcgctggcggcgaattaagcgaagatgccatcgaaggagcctataaagctctgaccgatgcctattggattgccaaagagaacaataaaaaatacgccccgaaaacgaggcgtaaaaaatccgatcagtgatatttatcgtacacacttttcgctatactgtaaactggaggtggtatgatgaatgcggaacagctttcacgggtcggtgagaaactggtaaaacgctgcggttccagagacccttttgaaattgcaaggcagcttggtatcaatgtcatgcgttgcgaaaatttcggctccctgaagggaatgtaccgggtgattaaacgaaatcgctttattttcctgaataacagtctggatgaaaatatgctgcgcatcgtgtgcgcacatgaattagggcatgaccagcttcaccggaatatggcgaaaactaccccgattcatgagttcatgctctatgacatgaaatccaaaccggaatatgaagccaacatcgtagcagcagaaatcctgatggacagcgatgaagtccttcgctacatctatgagtatggatatacagccgagcagatcgccagtgcgatgtccaccgacatcaatctggttgcgctgaaggtcgcacacctggccacacttggatataatctgcacgcactggaacataaaagcaactttttgaaataacgtatctttgaggagcctggaccggctcctcttttttgttgcaaattgtgcaggcggtgcttgcacaattataagcctaacatctgcatgtgatagagcttcactttttcctcaaacggcagtcccggatcaatgccgacttcttcccacatcacaccatacggtgcgccgccatctgtatatccagcgataaaagcaaaacgaccatcgcagtcctcatacagttctcccagccgttcccgttctttagcttcccgctccattctccgctgccgaagtcgctgttcttcagcctgtttaatctggtcaagctgctcctgtgtataattgactccaagctcctgcaaatctttagcggcagtcacagcatccacatgaaagcgttcgcggtaatgcttgttcatctttttcggtgagccggtataggtgagcagccactgcttgccttttcggaggcgggcttcctttcgctcagccttcgtcagtttctttttctttgccatttgcgaaatctcccggagtttttgctgatgactttggtttgcgcttcttcggtgccgtcagctcatagctcaaagaaagcaggtctttgatggcatcatccagctccggtttgccgagctgaatactgagccacttttccttgttcatatgataagccggaaaataaccgtcctgtccgcgaagagagccgatcaacagcggatcacttttcacattaaggacatcaatgatgcctgcctccgtcaatcccaacttatcagcagatacttccagaactacaccataccatttattattgtcgttgtgccgcagcaccgcattccagtcatgccaggggtattccggctctgtgccgtactgcttgcgtatccatgtaaataattcttgtcgtgtcactccatcgcttccccgctgttttatgtgtggttttttgcaacaacctgttgcaaaaagttttgcctcagataactctccgcactgcattgatatcagaaatcatccagcgcagcatcaatctcttccagccgatcaatccagcccaggtcagatttcttcttggttgctggtctttttttatcaccaccaaccacttcaaaacgtttctcttctgtcccgaacaaacttttaacctgaattctgaaatccggcttgttgttggccagtccctgcatgagctgcacattcttgtatctgggcaggaggatttgacagatagcctgaatgtcttgctccttaatacacggtaccgccatgaactttttcgttatgtaaggctttatatctgccagtacctgtgacatagaggctttctttcggttatcagccataaaatcccccccccccttccaaaacgctacctttctttatctatcgtccagccagaatgtatagaaatattacttcatattggctatatactttttcaacttaatgattctatcttccgtatcaatacccgcttcattttgagaaatagtaacggtatccgtaaggctatcatcatcatttctgtaaacaccatatgaattgttttcacagacaatgtaaacatcatcataaaccaaatactgccccatctcgtctctggatagatggtcatcatctgcttctttcaaatacggcatgtacgtattttgtgaccactgcgtctttgtctgcataaccgagaacatatatggcttatttaccacatcgtcgttgctcatctttccataactaccaggacggaaaacaggatactttacataataataattccatggatataaattatccttttcacattgagccaagaacgcagaaataattctatccaaaatgccatcatcgaaactttctttcgatttgagcagttcaactaaaattgtatgtgtattttcaaaaccggcatttgcacttttatgaaatagctcatcccaagcatactgcaaactttttgacgcaaactgataacgccatttgtttctttcctgctgcccatagttgcctaacgccattaaagcacagtcaatcttatcccacgaacaggtgaataaggaagaaaaacgagagcccagtgaaagattatcgaggccaataataccaatttgcccttttaacatgttatgatcttccagttcaaacacttcatctgtacggtctgggttttgcattaggaattcaattttttccttttcttcctgtatctgattcacattgaagttaatctcaatagaatcatcaatcacacctgtaagaataattgcatcaacagcctgaagaattgcgggaattctgtttctatcctgtctatcactaacctcatcttcggaattctgaattaggttgttgacaattctgattcttctcacgaaatcagaatatgtcacttcgctttggtgctgtaaatagatcgttatggcatacaaaagcacgatgcggtttaatggaaactgccgtattctgccggacttatcagaataaaaatgcaagcaatcctcaaaaacatcaatcttatatctggaatcaaccacaattttcccgcgtgcatgagtgtagctcataaacgattccaaaaattcagtcggattgttatagccttttattttacaccagcaatcgaagaacgattctagcgtagctatgtttgctactgctttctcatcgtctgcggagaaatacaagtgcagcaaatcaaaaacgtcgctgctgtagccttgtggagactgcccattacgataacaaatgatatcgcaaacgaacttgaagtatcgtagaaattcatcatcaataatattgtcatccgcatcactggatccgctgctgcgatatttccacaataaatctgtccaggatttatctatttttccaacaatacgatctgccgtattctgaccatttttttcatcgagagctctgatttccctctccagttctgctttgaaatgttcaaatactgtcaacggcttcccacgggaattcattttaatataaagctcatcagtaagacccatatctcttattggcaagaaataaaaggtaatcgctttattttccaattgctcccatatatccggtacatctttgaagcgctcatcaatcgcatccaacattacaagcatggagctgatagtaggatcatctttccagtcaaacggaaaccatgcctgattctttatgtcagcagaaagcgtagtttcaaaagatggcataaacttcacaagctcggcacagaaatatcttgcactataacgtgtttcatagctgaacctgctgagaaatgcgtacttgtcatcagaaattttttcctttttagccgcataccaatgcaagaggaacaacgttgtcaaacgctgctgaccatccaaaggcgtcatagttccttcttcatcaatgtcaccgtaaacaaagtcaagggtaatcggctccccagtaacagccctataaagtgcctgaagaaaacgacttcttactctattgatgtctttatcaatacgtccttgagcgtagtctctctgaataagggggattacaattttattaagctgaactgaagtatctccatcctcaatcgttgtttcaaagatatccataaatgagtgaagcgtcgtactcattttgtttcctccttttccaaaacaatcggttctatataatcgctcagaacatcattgattgctttaatataagcaattctgtcggcctgtccccaaaagtgaagctgattttctgcagatggagtataatatttcagaaataccatctttgtacagaaaggaatatactgtccttttttatccatctgaatgatgtcatttcttttcacatcaaatgtcgaattattaagagctgcattgtccgccgtattaagcaatgcaagatttgcaatggaatgcatgtactctgtattgcctgaaacggataacaaaccaagaactttttgctgaatgctctcaaatacagtgcgctccagcttatctgcatttatcgcgccttgcatttcatcaatcaattcactatgttcaccgccgatactttcaacagatgggatatgaagttccagccactttttccaaacatcttgcgttttcataccttccgattgctgggcatgtatatgctctaggctccatgtaacattgctgcccttatggtgcttaaactgatcaaatggaaaccgttgagcatgtccatcacttcttcttaccgattcgatattgaataaaagcagtaatgtactaatccgcttataatccaacggcttctcataactgagttcagcataatttccagaaatcgcaacgctctttttaatcagttcgtcgagagattcattaaactcgctcttctttttatcttttgacagagcaaatattttatgcagagaagtgccagatgtaatcaaatagccgattctgtggtacagatcatgatcctcgtaccagcccttcaaagtaagaaaagtctgatagatttttttccagatatcatccagtgatacttctttacgcaattcatcaaatcgaaagaatgtataatacttttctcgtgtactttcctctttaccggcaatcaggtcaagaacaaggtcaattcttgtctgatattcacctttgacgctgtttgtcaaaaagaaccacagagattcattatgaagttccctctcgatgccatcccattgcagcgatatctcttcctgcttttccctgcgcatattctctgcattatcccggctaagaaacatcgcttttaccagttctgcgcttgttagcggaatttttccgatattcagacgggtaaacagtgaaattgcatcttcactttccccaacctcgtaccagatgattttgacatcttcttttaagtattcaaagatatgcatgacccgaatttgtaagtcctgctcaaaccactcttttatggtgttgtatgccttggctataaaccaaaagtcgatgttatcatcctgtttcgtcatgtccaaagttttcaaaaactcttctgactggtctcttgtctgataagaaagtgtaaatgctggttcattgaagaacggattcacgttcttcatatacttataaatgagatataatgtggtaagtctctgctgtccatcaatcagttcgtaccgatcttcttttttacgaacgaccaccggttgcaggcaataatttttcttaccattctgatatatatcatctaacagacgtacaacctctgtttcactccatctatagcctctttgatatgacggaatataaaaagagcctcttatatcagctacgaattttgtttccagtataatattattgcccatagcccaacctccatctgtgctttaatcacattcttttgtttactaatattcctttacatcttcccatgcccccgatagcccatcaagataaattcctttaaccttgaaatcaataattttgatttatcgctctgtcggacaaatgcggcaaattgctcctgaagctccattggtggaatgtaaatagtgatgttttttagtttggtaacattaatgcctttcatgatctgaccatttccaaccatctcaatctgattaaccacattcgagctatagtggaactggcacatcaaaaaggatggtagtagttttgttttatccgggcgtattctaagaacatcagaagctataattcccggtgtataatcagcaggatacaacgcacattggcctatgtttccctttcttgacattgcaatgtcgtcaggttgaattaaaaacggtgtaagctgtaatgccttttcctcacccacataggtgtccgctgggatagaaaatgctgcattgacttgaggaatcccccatacaggaacaccttcttccgtatactcagattgcttcagttgtgtaccaaatgggccacatttaatatcatcatcattctcgcaagcagctatcaaactacatgtattaaatgactgccttttcgcttcaaactccccgaaaaattgagatttgaacagctctgagcggcaaattttgatttatcggtctggtctaccagcagtttaaaacgttcaacagctttcaactcaggtacaggaatacttataacaaaaaccaccggggcggcacactttcgcatgccgccccggtggtttttgtatatgggtatatcatcaaataatataagaaggagctttatttatgccacgttcttcttcagaacgcctaacaataccgcagataccacagatccgatcgccagtgccaccagatacatgaatggattaccgacggtcgggaatacgaagattccgccgtgcggtgccatcagagtacagttaaatgccatggaaagtgctcctgcgactgccgatcctaccatacaggacggaagtacatgtaacgggtcagaagctgcaaacgggatagcgccctctgtgatgaaggaaagtcccataacaaagtttgtcggtcctgcctttctctcctctgcggtgaacttgttcttgaatactaatgttgcaatagcaattgcgattggcggaaccatacctccgaccataactgctgccatgatgttatagtttccggctgcgatggatgccgtaccgaatacataagcagccttgttcacaggaccgcccatatccacagacatcataccgccgagcagtgcacccagcagaattgcacttgcgccgttcaatccgttgagtccgttgttgatcagagtgtttaatgctccgattggcggctcaaccacgtaagtcataatcacaccggtaataaaaataccaagcaccggataaatcagcatcggcttcatgccttccaggctttccggcatctttgagcagattttcttgagcagaagcactacatagcctgccaggaaaccggctacgagagctccgaggaaaccggaggttccgtttgccgcgatcgctccgccgacaaaaccaacagcgagaccaggacggtctgcaatactcattgcaataaaaccggcaagaatcggaagcatgaatccgaatgccgcgccgccgatcgacttaaacattgccgctaccggtgtgatcgtaccgaagttacttctctgatccatcggaagagaattcagatctacggaaaatccatcgatcaggaatgccagtgcgatcaagataccgccgccgacaacgaacggaagcatatgggatacaccattcatcagatgcttataaatctgatgtccgacgctgtccttctcatcatcgtttctatttgccgcttctttattagatgcgtggtatgtagccgcatctccattgattgctctcttaatcagttcctcagacttgctgataccgtctgcaaccttacactcaatgacaggcttgccgtcaaaacgctccatcggaacctgtgtatctgcagccacgataatgcaatccgcctcagcaatctcctctctggtcagcacattcttggctccaccggaacctctggtctcaaccttgatgcggcatcctaactctgctgctttcttctcaaggctctctgctgccatatacgtatgcgcgataccggtcgggcatcctgttactgcaaggatcagcctgcctccctttgtctctgcctttgccggtacctctttggattcctctgcatcctttgcgctctcagccacatcgatgacatgcaaaaactcttccacgctctttgcattccgaagatcatttgtgaacttctcatccatcagcagtacagaaagtttgctgagtacatccagatgcacattgtctttggtgttcggcgcagcgatcaaaaagatcagatctgccttctcaccgtccagcgactggaaatccacaccacctgcgacacgcattgccgcaagtcccggtgcctttacaacatctgatttgcagtgaggaatggcaattccttcaccaataccggttgtgccctcttcctctcttgcatataccccgtttcgataagtctcgacgttgccgatcttaccacttctcgccatcagatccactgcgtgatcgagggcttcttttttgtttgcagcttttgcattcaggtcaatgctctctaccgctaacaattccctaattctcatgatccttcctcctccataatattaaatggtttctatttaatctgcgcacattttataattctcatttgccgcaaaattaaaacaagttttggttcttctccagcagatcaagcacctctgcctttgtcgcaagctcttccgaaaaggccgatgcacttcctgtacatacccccatctgaaaggctttttcataggttccatgctccagatatccagcaagaaatcctgccaccatggaatcgccagctccgacggaattgatcagctttcctttcggcgcctctgcctgatacaccgatccgtcctcggcaacaagtaccgccccgtctcctgccatcgaaataagcacgtttctggcccccctctcctgcagcttcttcgcgtaagtcacagcatcctctttctcgcggatctccacgccaaagatctctcccagttcgtgattgttcggtttaatcaaaaatggatggaacggaagtacatttgccagaagatctctcgtggcgtccaccacaatttttaagttcctgccctgcagatgtttcatgatatccatgtacatcgtctgcggcatcacatccggaatacttcctgccatgacaagtatgtcgccatcctgcagtgcatccagcttttcatataatttatcaatatcagaagcagcgatcgccggaccttgtccgttaatctcgctctcctgctctgaccggagtttgacattgatacgggtcattcccttttctaccgggataaaatcagcatgaattcccttatcagccaccagccgtttcagctccataccggtaaatcccgcataaaagccaagtgctgtattctcaaatccaaggttcttcaacaccatggatacattgattccttttccaccggggaaaataatctcttccatagtgcggttaaccatcccacaggtaaacttcggaacggtcacaatataatctaaagacggattaaatgttaacgtatagatcatcacctaagatctcctttcactcgatattgatgatattggaacaatccttgtatatttccagttttaactctgtcgtaatcacagtcgctttctcaaacggtgcgaacgtcacgctcgatatctgggaaaacttgctctcatccgccagaatgtaacagtctctgcaattctccatggatttccgttttaccatcgcctcttttaactccggtgtggaaaatcccctctgccggctgacaccattggctccccagaagcctttcgtaaaattgtatttatccagtgtaaaaacggcttcctcaccgacgatagcctctgtcaccgccttgaactcaccgcccaggatatagaccttgcatccatgctccgccagctttttcgcatggccgatggcgttcgtcacaaacaccgcctgacggtttgcaatgtaatcaatcatccgttccgttgtcgtacctgcatcgatataaacaaaatcttcggcagtaatcagtcccgccgcatagcgtgcgatcttatcctttgcctcccggttctgctccttgcggtgaaccacttcatcatcgatggtgctgtataccgtattcttcaaaatcgctccgccgtgtaccttgacaagctggccgtttgcatccagcgtattcaggtctcttcgcacagtggattcagaagcgtcaagttccgtcatcagctgctgaaccgtcacactccccatatgttccagtatggacaaaatctttgcaaatctttcctctgtcagcatgatttattctccgttttccgtcatattcgttcaaaatcgttcatctctatagttgcattatatttccgtttccagtcacagtcaatcattttccgtcaaaatcgttcacaaaaatcgtcatcgaaatttgtataaaacacacaaaaaagaaggctgacttcttcacgaaatcatcctccctcacaaaaaaaatcccgtatcaccctcttgcaacggcagaccgcctcccggagcacttcctccgtcacatcgccttctcatagcggcagatcacctcccggatctcctcctctgtcacccacacaagttcggtgttgcgtgtccggtactcgcgcatcacgtcaaacggacggtttgccagatagcaccgcagtgccatcagcaccgcactgtgtgtcacgacaagcacatcgtccttctcgcacgtcagaatctgttccagcgcagccagcgtgcgccgcaacacctcgttatagcactctcctcccggcgtatggcagaacctcctgtgggtatcccagatgtgatgccgctctgcttccgtctcccttatctcatcccagttcctgccttcccagtctcccagatccatctctcgcagatcccagagccggatgcagtcaatgcccagcgcctccgcggaaaaacgggctgtctctgccgcccgaagctgcggcgacgtgtagactctgtccagatgaagctccccgtctcgctgcttctctaagagtgtctctgcgagccgcttcgcctgctgtattcccttctcatccagcggaatgtccgtcgttccctgtatcttcttttttacattccattccgtctcgccatggcgtgtaaagtaaaaattcatatgcctctccattcatggtgcctgcatggtttttaccgtttccaccctaagtatataccaggaccgatatcttttccaagagcaaatacacacaaaaaacggaaagtccggtttccctgactttccgtttttattatctggcaatatcgatacgcaccagcgccttgcgcagcgcaaactcggcacgcttgacatcaatcgcctctgtccgattggcaagacgctcctcagcgcgtgcttttgccgcctccgctctcgccttgtcgatctcgttcggccactcagcaatctctgcaagaagtgttaccttttccggcaggatctctgcaaacccggaatgaaccgcagcaatgatatcctcctcgccctgcttgtggatcgttacaacccccggcgcaagaaccgttgtgagaggaatatgccgcgcatacactccaagctctccggcagccgtattaaattcgatcatcgtcgccgttcccgtgaaaaagacacgatccggcgtaatgatctccacgtcaaatactttgttctcgtctgccatagcttatcctcatttccgctactgtgcgttgttatacttttcgcgcacttcatcaatggttcctgcatttaagaagtaactctccggaatgtcatcatgctttccttccagaatctccttgaatccgcgaaccgtctccgtgatcggaacgtattttccttccagaccggtgaactgtgttgcaacagagaacggctgggataaaaatctctgaatctttctggcacggtttacgacaagcttatcgtcctcagacaactcgtccatacccaggattgcgataatgtcctgcaattccttgtacttctgtaaaatctcctgcacaccgcgcgccacctcaaaatgctcctgacccacgatacgcggatccagaatacgcgacgtagatccaagcggatccactgcagggtaaataccaagttctacgatcgaacgatccagaaccgtcgttgcatccagatgtgcgaatgtcgtcgccggtgccggatccgtaagatcatccgccggtacatagactgcctgtacggatgtgatggaaccgttcttcgtggatgtaatacgctcctggagcgcacccatctccgtctgtaacgtcggctgataaccaacggcagaaggcatacgtcctaagagtgcggacacctcggaacctgcctgtgtaaaacggaaaatgttgtcgatgaaaaggaggacatcctttccacctttgtcacggaaatactctgccatggtaagtcccgtaagcgccacccgcatacgcgctcccggcggctcgttcatctgtccgaacaccatggtcgtcttatcgataacgccggattccttcatctcgtagtagagatcgttaccctcacgggtacgctcacctacaccggtgaatacggaatatccgccatgctctgtcgctatgttgtggatcagctcctggatcaataccgtcttgcctactcctgcaccgccgaaaagtccgatcttaccacccttctgatacgggcagagaagatctacgaccttgataccggtctcaagcatttcctgcgacgttgcctgatcctcgaatgccggtgccggtctgtggatcggccagtgctcgacatccttcggcgtgtcgatctcatcgatcggattacccagaacgttgaacatgcgtccgagcgtattctctccgaccggcacgctgatcggtccgcccgtggcgattgcctccataccgcgcacaagtccgtccgtcggtcccatggcgatacatctgaccgtatcatcacccagatgctgggaagcctcaacgacaagctcaccaccgttctttaacggaacgcggattgcatcgttgatctccggcagcgcgccttccggaaacttgatatccagaacggcaccaataatctgggtaatcttacccgggcaatcctgactgcctctattatttgccatcgctatttctccttgtctgttattttctatcaccaaatcctgctatacagcttcgcgcttccaccgccatcgggcgccggaactttttgcactgctgcctcctaggatatcgcagaagctcccgcaataatctccgtgagttcctgcgtaatagagccctgacgtgctctattgaatttgagtgtcagatcactgatcatatcttccgcattgctggtcgcagaatccatcgcctgcattctggctccgttctcactcgcaaccgcctccaccagcgccccgtaaaacaggctggtgacatacttcggaatgatcatatccagcgcttcttcctcgttcggctcgtaattcatgagcaccttctcatccgccgcttcccgcatctcgtcctcgtcgaactccaccggaagaagcttgatcagcttcggctcatggctcaccgtattcttaaaatgcgtatacgcaagatagatctctccgatctctccgtccgtataggcttttaaaatctgtttacagagctccgccgcatcctcataggacggggactccataatcgaagatccatctgctgcaatctcatagccctttcgctccagagcttctcttcccttattaccgatggcgtagactctcgcattctctgtcgtgatgtcctcgcttccggtcaccagctttacaatgttggagttgtaacctccggcaagtccacggttggaagtaatgaccacaaccgcttttttgtcactctcacccttcttgagatacgggtgattgatcgtgccggacttcgccagcatggaagtcactgtccggtacatatactggaaatacgggttcgtctgctctgcacggttcttggctttctgcagcttcacggtagacaccagcttcatggcttttgtgatctgctgtgtactctgtatactgctcttacgtctctttatgtctctcatcgaggccataatacgcacaccgcctttctgccgtctactttgtgaactcttccttgcactctgtgattgcctttatgagcttcgcttctgtctcttcgctgattaccttctcagtgcggattgcttccggaacctccggatacttcgtatccacatactcaaacagtgccttctcaaacggaaggatgtccgcaaccggaatatccatcagatatttgttggttgccgcgtagataatcataacctgcttctcaaccggcatcggctgatactgcggctgctttaagatctccttgatgcgctcgccctgcgtcagcttctccgtcgtatccgcatccagctcggaaccgaactgtgcgaaagctgcaagctctctgtactgtgccagctcggtacggatcggcgccgcgatcttcttcattgccttgatctgcgcagaaccgcctactcgtgaaacggaaagacctgcgttgatagccggccggaaacctgcgttaaacatctctgtctcaagatagatctgaccgtccgtgatggagatcacgttggtcgggatataggcagatacatcgcccgcctgcgtctcgatgatcggaagcgcggtcagggatccgccacccagcttatcggaaagtcttgctgcacgctcaagcagtcttgagtgtaagtagaaaacgtctcccggatatgcctcacgtcctggtggtctcttgaggagcaaggagagtgtacggtatgccgctgcgtgcttacttaaatcatcgtacacaacgagaacatcctgtccgttctccatccattcctcaccgatcgcacatccggcgtacggtgcaatatactgtaacggtgcaagctcactcgccgtcgatgcaacgatggtcgtgtaagacatggcgccaaactcttcgagggtcttaacgatcgatgcaactgtcgatgccttctgtccgatggcaacatagatacactttacgttctgtcccttctgattgatgatggtatccagcgcgatcgctgtctttccggtctgacggtctccgatgatcagctctcgctgtcctcttccgatcggaaccatggaatcgattgccttgataccggtctgtaacggtgtgtctacggattttctggagataactcccgatgccacacgttcgatctgacgatatttcgatgtctgaatcggtcctttgccgtcaatcggctgtcccaatgcatttacgacacggcctaacatggcatcgccaaccgggacctcaaccacacgccccgttgtctttaccgtatctccctcgttgatgttcttctgggaaccgagaagtacggcacccacattgtcctcctcgaggttcaataccattccgtatacttcgcccgggaactccaaaagttctccctgcattgcattgtcaagaccgtgaatacgtgcgattccatcagccacctgaattacggtgccaacgtcagctacttccaactgcgctgcataccgtttgatctgttctttgatgacggaacttatttcttctggttttaaattcatggagcgcattcacctgctttcaactgtattttggataattcgcgcgtcagatcgtacaactttgtcctgaccgttgagtcaacgacacgatcgccgatgcgaatcatcattccgcctatgatcgcggaatccacttcataatgcatttcaaatgttacatactttgtggtctctaataagcgtttcaccactgctgccttctgcgcatccgataattccattgcagtcgtcacatatgcagtcccgatactcttatattctttgacctgatcatcaaaatacgccaaaaccttcccgatctgtgcaaaatgatccttttccacaatcatgcgcaaaagtcccaccagttctgcacacacctcaccggtaaaaatcgattcgatgatctttactttttcttcttttacgatcttcgggtgacgcatcagcgcgaagagctccggattttcctccagcgcggtctgcatggctctggtctgctcccagatctcatccagcctgccgctctccactgcgacctcgaacagtgcatcaccgtatacctttgatactagctttgccatgtcgaatcacccatttcctttaatgtctcttccacaagcgcatcctgtaccgacgcatcgatatttgccgcaaccacttttgcagccatcatggatgcaaccgtgatcatctcctgtttgacatcatccatcgcacgcttcttggaaagctctgcttcctcgttcgctctctggataatgcgggcagcctcttccttcgcttcggactcgatacgcgctgcattcttctgcgccttctgtctggcctcacttaaaatctgttcagcttctttgtcgatgttcttcaatctggcttcataatccgccttcaacgccgctgcatcttttttgtcattcgcggcatccgacaactctccggcaatcttttcccgtctgtcggcgagcatctttctgacaggattaaacagcagcttcgacatcatcatgaacaggaaaaatactgcaatcgccatgagcacgacatcgtggagcagctggaaatccagattaaagagtctggtcatctcttccaaggtccggcctcctttccgttatattcgttctctccgtctcttcctataccaacggttttacgaaaagcaggagcattgcgatcaaaagaccatagagacctgtcgtctccgcaaccgcctggccaagtaacatggtagacatgatgtcaccctttgcgcccgggtttcttcctactgctgcagctgcatgtcctgctgcgataccctgtccaataccaggtccgataccggcgataaccgccagacctgcaccgattgctgagcatgctaaaattaaatcttctcctgtgatattcatactgataccctcctaaaataatctttttggtttcgacgtctattccgtctcatagttctgactgatgtaagtcatcgtcaacatacagaatacgtatgtctgaattgctcccgagaacaaatcaaagtatacatgaagcgccgccggccagataatcgctatcttgccaagcagtccgtatacaagcgccatcatgaccgttcctgacagtacgttcgcaaacatacgtaaggaaagagagatcggtactgcgatctcgctgatcaggttgattgggaaccagatcggcagccacggcggcagtggagaacacatatctttccagatctgcttaggcggcagattcttgaactgcgtgatatggatgagagcaaatgtgatgagacctaacgccagcgttgtgccgtagtcggcagtcggcggtctcaacccgaacaaaccggaaatattgctcataagtataaacacaaaaatcgtgctgatgtagttcacgaatttcggcgccgcaacttttcccattgttccatataccatcgcatccagtttctctaccatgatctccagaacattttgaaagccctccggaatttcctttgcatgtttcatcgtccgatttgccgcgatcgccagccccaacatcagcagcagcacaatcaggatgcagacgtgcgatgttgtaatccagaccgtatgaccaaagatctcataggaaaaaatcccatgtatcatgaagtcaatattatcggcaccagaagacatcaaaattgcgttattcacaatttcacctccttatagagcttcattttctctgctgtccgaaggcacatcacctcttcctccaagctttgaaatgaatctatgtgcaaggggctgcagatacgctgatatcttcaatcccaaaacaccaataaatgctgccggcagactgccaagctcccacttcatcatcacgaaaaatacaatgacgaccaccagatacctggtaacggaccgggctatgatcttcgaccgggctttcgcctccccgtagatctcaaccgcgtcccgcagaaccaccgccatattgaccgccatcccgcaggcaagggcaatgcctatggcaagtccggtagtaaatcgcagcttgtccggcacgaaccagattcccgccagaaaaaccgccgccccatatacaataattcccagaacaagaccgggcaatgcatcatttagtcttctcaacatgatcccgcttcccctcatttccctgtccgtagatcttcttagccatcttaaatatattattaaatccggcaagtgcgcccatgataaacaacggcactgttatgatgggcattccgtatttttcccccagccacgcaccgagcagcgtgcacatcacgatcggcacgatcatgttcagtccaaactgcagaatcagtgtcaaagactggaaaacctttcgctgatttttcatataaaatcctcactgtaccgcagtctctgctgcaaccattgcctattatttttcccataacaaattcttttataagtataaaagatttgtaaagaaaaatcaaccgacgcaaagaaactgttttaaaaataaatggatattctggaatttactgacacaaaaaggagccgccatctctggcggctccaaaagtcctttttctacagctggatcgtgacgatcctgccggtatgttcgtatttctgtatatccacccctgcggcagagagcatcttccgcgacgcaatggttgacggcgtcccgttatacttgtcgctgtcgtaaaccagccgcttgatgcctgcctggatgattgccttggcacattcgttgcacggaaacagcgtgacatacatggtcgcgccctcaaggctccccccgcggtaatttaaaatcgcgttcagttcgctgtgcgtcgtgtaaaaatacttgttctccagcggttcgccctcgcgcgcccacgggaagtcgtcatccgaacagcccgtcggaaagccgttgtatcccatggaaagaatcttgtgctcctcactgacaatgcaggctcccacctgtgtattcggatctttggagcgcatccccgacaaggtcgcaacgcccataaagtattcatcccagctgatataatctgtacgttttccgctcatgttcctatcactcccacctgcgtccgccgcatcaaacagattctatttcgtgccgaaaatacggtctcccgcatctccgagtcccggtacaatgtagccgtgctcgttcagatgatcgtcgagcgcgccgatgtagatatccacatccggatgtgcctcctgcatctttttcacaccttccggtgctgcgataatgcacatcaggcggatactttttacgcctttatcctttaacatctgaatcgccgcaaccgaagatcctcctgtcgcaagcatcgggtctaccacaaacacctctctgtttgcgcagtctgccggaagcttgcagtaatattctaccggctctaatgtctcaggatcacggtataatccgatatgtccgacctttgccgccgggatcatgttgagcataccgtccaccatgccgagtccggcacgtaagatcgggacaacggcaagctttttgccctttaattctttgaccgtggtcttgcagatcggtgtgttaatctccacatccgtaagctttaagtctctggttgcctcgtagcacatcagcattgcaatctcgctgaccagtgtacggaaatccttagaaccggtctcctccctgcggataattccaatcttgtgctgaatcagcgggtgatccataactactacttttgacattttttgtaccttccctttctgatacacagagcctaatctgtgccgttatcttcactttcattcaataggttcacaagctttaagatcgtcttgcgcatcgtctcataacagagtccgtatgcctgaagcgtccccccgtagggatcgatgatctcaagttcgtctcctaccagttccgtaagaacatagacattctccggatcggcgtgcccgtacttttccagaatcttctctctctggctgtgttccatgactaaaacgagcgcatcctccgaaaaatcctcctccgtcaactgggtggacatgaatccatccatattgataccattgcttatcataacagtttccgccttctgattcaatggttccggaaataaaaccaccagtcccctggcaagtatttccaccggatgttttaaattgcattcctgcagaattcctgcagccataggtgctctgcaggtgccgctttctgcaacaaatatgattcgattatattgtctcatagaaatgtctgccctctccctgatgtagctataccggaatcacctgatgccccgccgccttcagcagtcggttcataattgcctgaccgatgcgcggtgtggcaaaactctccgagtagatcgcatccacattccagtcatcaaactcacgcaggatcttgtacaagtgtctggcaatggcatcctcatcttccctggcgccaatgctgacaacgtgatccgcctcatagcgtaaaaacgtctcatccgtagcgatcactccgactttctgtccgagctgctgcttttctctgaccagctcattgattctggcaacgaccttgtccgtctcgccctccaccagcacaagatccgccttgggcgcataatgcttgtacttcatgccgggcgctttcggctttctggtggaatccgacgcaataattcccggatccatgcggacttcctcgccgagaacctcctgcagcatctcctgtgtgatatatcccgggcgcagaatcatcggtgtctcctcactcagatcaacgatcgtcgactcgatcccgatgccgaccggacctccgtccagaatcatcgggattctgccatccatgtcaagcgccacatgggatgcctcggtagggctcggcttgccggatgtgttagcgcttggcgctgcaatcaggcatccgctcccctcgatcagccggagcgctaccggatgcttcggcatacggattgccacggtatccatcccgcccgtggtctcataaggaactctgtcatttttccatacgatcatggtaagcggtcccggccagaacgcgtccgcaagcttcttcgcctgcggcggtacctccctcgcgatcgataccagatcttcaaactttgaaatatgtacaatcagcggattgtccgaaggtcttcccttcgccgcataaatctttttcgatgcctccgggtgcagcgcatccgcccccagtccgtataccgtctccgtcggaaatgccaccagctctcccgcgcggatcagatcacacgcctctttcatggctgcatcgtctatattcgcagaatctatcttaacaacctttgtctgcatattattcgcctctcaactgttgtgcctttgcggccgtcatatgcactgtctcctgacctgctttacagtgcgtgcatgaccgcttcgctttcgtgaacattattgcataatttcacaatttaggcaagtttgacatttcgcccgctatgggcattcttccgaaaatagggcaattcacttgccatgtttttgcaaatgtggcataattatctgcgttaggtttgtcctgatataaatggaaaggagtttcctatgaagattacaaagtcagattttggcacattaaacacaggagaaaatatttatatataccatatggagaacgcaaacggcgcttatgtggaagtcatcaatttcggctgccgtctcgtaaagatcgtggttccggaccgcgacggaaaaatgacggacgtctgcctcggtttcgattccatggaagattacgcgcgcgacaacgccagcctcggcgcagttgtcggccgtgttgccaatcgtatcaaggacggtcatttctgtctggatggcaaggaataccagcttgccatcaacaacggctccaaccatctgcacggcggactgatcggctacgcttccaagccctgggacgcaaagatcaaggatgacaaactcattttaaccatgaattcctacgacggcgaggaaggttatccgggcaatctcacactttccgtaacctacggctggtcggaggacaatgagctgtcccttctctacgaagcttccacggatgcggatacgctgttaaacgttaccagccacggctatttcaatctgaacggtgaaggctccagtgaggttttatcccacgagcttttcattgacgccgatcagatcacagagctcgatgactcacaggcaccgaccggcagattccttccggtagagggaacgccgtttgatttccgctccatgcacaccatcggaaaactgatggattccgactacgagcagtatcacaagttcggcacctacgatcacaatttcgtcatcaatggcaccggattccgtgaggcagcggttctccagtcaaaggagagcggtatccgcatgacatgctttaccgatcagccgggtatgcagctgtatgtggcaaaccagccgatcgaggtcaccggcaagaacggtacgcaatatgcctgccatacgagcgtgtgtctcgagacacagcattttccggacgcgatcaaccatgacaatttcccgagcatcgtgctgacaccggatgagccgttccgttccaagacactgtatcatttttcaacattctagcagaagctccagcatggaatatatttcgtaacagcattatgtgctaatttaagtacacggcttttttgacttgaaagccgtgtatttttgtattagaatgtcttaaaggttatctataagggtagccgggttttgattacaaattaaggagggaatttaaaatggcatacgttatttctgattcttgtgtaagctgtggaacatgcgagccggaatgtccagtaggagctatttctcagggagacagccagttcgtaatcgatgcaggttcctgcgttagctgcggaacatgtgcaggagtttgtcctacaggagctatcagcgagggttaatctttcgtacatagccaaaagccgtcacgcttgtgacggctttttctttttccagagtttcttttctttctgttcgtcctttttgcggatgtttccacgaatcgcagcatccagcctgcggaagcggtcctcctctgcctcttcccgttcccgcatgaggtaattcatctccttgatcacctgttttcctacctcctcgctgatgctctgccccagttcttcattgttggcggcaagcgcttttcccactatctcggtcatcagttctgtgaactgtgccatcttatccgtattgtttagaatactctgcgggctctcggcggtcgtttttaccggaagctgctggggtgcagcgggctgcaccggctgcacggattgctgcaccggctgtgccactgctgccggctgtgccgcgaccggttgtaccggctgcacggattgctgcaccggctgtgccactgctgccggctgtgccgcgaccggttgtaccggctgcgggatcgcagccgccgctcccgcagaaagcggtgcctgtcccacaggaatcggtgcttctgccgtcagcccctcgatcggtccgttatgtacaatcatgcgtatcgccttcaactgatagccctgctcctttagttccttgattctctgaaattccgcaatgttttccttcgtataataccggtgtcccatctcattgcgcgggatattcagttccagttcatcttcccagtaacgtaacacatgtgattcgacgtggacgatatttgccgcatcggaaatcatataacgtaccttttccatacaccctcctatattgtaattccttaacttatattataggtgtatcgattcttccgtacaacaaaaaccgctcgtcttattgcgacacaaatcgccggtctttcttatttttcacagaactaggcgagtgttctgacccacgcctccatctgcgctctgtcatatccgttcaacatcttaccgctcttccagttcacgctgtccgggcagagtgcatgcagcactgcttctgtttttcccataccgcttccgccggatgttgcaaacgggatcaccgtctttccggaaaaatcatagctctccaggaacgtgttgataatcgtcggcgcaacataccaccagatcgggaatcccacatagacggtgtcgtactgctccatatgctctaccttgtccgcaatcgccggacgcgaggacggatcgttcatctccaccgtgctgcggctctttttgtccatccagtccaggtctgccttggtataaggcacctcgggacgaatctcaaacagatccgctcctgccacatccgaaagcagctctgccgtcttctttgtgacgccgctgcatgaaaaataaactacaagactcttctgactcatcataatcctccattcttaactcttttttctataagttaaaatgtttaaaacaaccttctctagcggtaagacttctcataaatcgccgcgcactcttcgtctgtcatcggcaccggatcacaggcaaacagtccacccatcgtcgcctttgcattcctggcgagaaccatgctctcctctttttcgatgccgtaatcggacatctttaagtctgatacgccgcagtcctcctgcagtttctttaacgctgtgataaaatcctccggcgccttggcatctttcatgccgagtgcctgcgccatgcggacaaaccgctcatcacagcagtgtttttcgataaagtgtctgtaatactccaccgaaatcataatcagtcccgcaccgtgcggcagcgccggatgaaatgcgctcatcgcatgttccatcgaatgttcgcttgtgcaggaaccgaccaccatcgaatagccggacatcgtattggcaaatgccacatgctccctggcctccagatcgctgccatcctttaccgcgcgcggcaggtaggttccgatattctcgatcgccgcaagctggaccatctcagacatcgggctgttcacaaccgagaggtatccttccacgctgtggaacagcgcatcaaacccctggtatgccgtgaattttgacggtacggtcagcatcagctccggatctaccaccgcaatcaccggaaacagctcatccatgccgccgcagccgatcttctcattcgttgccggattggtcacaacgccccactgatccacctcggatccggttcctgccgttgtcgtgatcgcgatgaccggaagtaccggattcactaacggctgctgctttccggttgctcctgccacataatcccagagatctcccggctgctgcgcatacattgccatgactttcgccgcgtccataacggagccgcctcccagtgcgacaatgaaatcgcagccttccttcttggcaaaatgtcctccttcctcgacgatctccttgaccggattcgctccgaccttatcatacagcacaacctccacacctgcgagggaaagctctttcatcgtacggtcaagtgcgccgctcgctctggtcgatttcccatttgagatgacaagcattgccttttttccaggcatcttctgctcgtgtaagtgatttaactgtcctgctccgaacaggactcttgttgggttataaaattcgtatgacatccttcgttctcctcccatgtcagttttcctgttttcattgcctcttcgtagcgtgagatcttgtaattcagacgtttcctggtctcctcgatctgccgctgctgttcctccagaagttcccgctgctccaccagaagctgcaatctcgcagggatcgtcttatcgccctgctgaaaaagctttacatattcaatcattgcctccaccggcagacctgccctgcgcatgcagatggcaagcgaaacccagctctcatccttcggaccgtaatcccgtattcccgatgccgtccgtgtgaccggcggaatcattcccactcgctcgtagtagcggagcgtatccgcggtaatatgatatttctcactgatttctttaattgtcatgtcctctgctcctttccggtgccctggaactctctgttcgttaggcattgtaagccctggagttcactccaagtcaagaggtttttgtaaaatgtaaacgtaaattcttcctataaccctttataacgtgtgatgacattctccggcttctccccgcagataaaatagtagtcgagctgtctctcgccttccgcgtagagatattgcccgtacgtcttaatatcgcagagcagcaccgtattttttgccgccgcagcgatgccatagccgcggttcgacagcacaagcggcattctatgctttttccctccgaaggatatataacgcgcatttaatgtcacatccagaaaatccgtatcgagcatgccctttgccttgatgcgctctttcttgtcccagtcgaaaaatacccagcttccctcctcgccgatcactctcggctccgcggcattttccgcaagcagaagctgattctccctgttccagaaagagaccgctccgctccgtttatctacccgcaccgtaatctcacccgcggcaatctcaacaacgcttttggattccctggcgctccatgaaaacgcttcctccgctttggtcatccagcccgtggctgcaattttttccgtcactccttttacaaagctgacccggatgatgtccggagcgaccggcgtaatccgcatcagcccgtacatgctcgccatctctacataggatctgctcttttttacccaccggaccgcatgatttccctttgcgtgcccccgaacgcgcagactggtattctccgggatcgtcccgaatgcatacggggacggattggttccctccggtcccggacgcttccctgccggcgccggagacgtcgccatatcctgctgcccgcgcactgtctctgcctgtggacggtgcattgccccggtctgcggacggtgcactgtctttgcctgctgcccgcgcactgtctctgtctgcggacggaccgccggggatgccgccggtcttatgaccggtttctcctccgccgcaggcgcttttgccgcaatgcgtctggggccgaaatattcccgctccgccatatccatggcgccttccaccctgcgctgctgcatctgttccttttttgtccggacaggcttctcatactccctggcttttgtgagcggttccgccgcaaattcctttatatgcttatcctgcggcgccctgcccgcaagaattccggacaactccccccgatggagaatcgtcagctcatgcagcgcgcgcgttgccgcaacatacaacagctttacatgaccgttgtccgacggatattttttctccgacgggtcaaacagaagtaccgcgtcaaactccagccctttcgtgtaggataccggaagcaccatgacgccgtccccgaactcctccttctctccttttgcgccgttctttaccggaacgtcctctgccagccgggccgcaacccgctctgcctcctcttcatcccgacagatcaccgcgatggtctcgtatccttttctctgccagccctgtatcgtctccgccgcccggttaagcagcgcccgctcttcctgcaccggttccacacagaccccggcgccatggcggatgatcggttccaccggatagatggaaaaatccccgtggcgcagaatctcgttcgcatatgtagagatctccaccgtgttgcggtagcttttccgcagaagcccaaaagcgtcataatcgccggtcaggatgagtctgcgcagttcatcccagtcattcaggccgtactgaaaatggatattctgcgaggtatcgcccatgatcgtgtaggtgcagtccgacaggcacgcatccatacaccggtatgccatcatcccgaagtcctgcgcttcatcgatcaccacatgactcgcctccctgaccgggtctgtctccttaatccgcttgtagatataggccagcgccgccagatcatagacgtcaaaggaattccccggcggggttacttccctgccgcgggctgcctgcgccgccaggaaatcctgatagaaggcatagaccgatccctcccattttccctttccaaagtacatcgtgtatttccggtcgagccgctttttctcttctgccggaaacgtgatgtctcttcccaggatctcattctcatatctggaatgaacaatctcccccagcatcagcattttgctctccatggagtccgccggatgctcctttagatagcggcggatctcatccgcaccgatcagaagctttcctgtcttttccagataaacgtcctccgccggcacgctctctttttcatattcttcgcagtatgtttttaaatcgaggaaccactccgtatcgcacttgacactgtttttcggatcgtctctctccatactgtggtacgagtagcgtgcatcgtcccagtcttcatatagaagccggacaaacagctgctccatcgtcagctgacggattccatacacatccagttccgggagaacgctcgtgatatagttcagaaggatccggttgcttcccacaatgtaaaaatcctccggccggaaatcatccttatagttatacaaaatgtaggatatgcggtgcattgccacggtcgtttttccggaacccgccacgccctgaatgatgacgttcgtccgcggcgagcggcggatgatgacattctgctccttctggattgtcgcaatgatctctcccaataccgcctttttattctttgcaaggtattttgtcagaagttcatcattggcaacgacatccgagtcgaagaaatccttcagcacatcctgttcgatctcgtacgtccgcttgcgcaccagatccatctcataggttccctcggagcttactgtataagtgcagggtcccatgctgctctcgtaatataccgatgcaatgggcgctctccagtccagcaccaccggctctgagccgtttttcgcaattccggctcttccgatataacaggtctcctcctcctgggagatgccgtccttaaaatcaattctcccgaagtagggcttttttctcgccttctcatagcggatcagatcgtattcattttcctttaatcttgccgtcgcattattccagagtgcaaggccttctttgtctttcacgtcgtatgtctcgagaagatccgccagatcttcgttaaccttgcgtatgtccgccccggcgcgttccagattctgctgtgcaaccgagatcacgtccgccaaatgccgctcctcgtctgccctggtcagccccaggtatccgcttttctgttcttccgatgtgctgcgcttatccatcctccgcttcaccccctgtctttttactataccaaaaaagcagagataccgcattaccaaatgcatcaaaggtatctctgcttttctttttctattaaaatataacggaaaaccggttctctaccgcaccgcctctgcctctgacaatctctttctgccgagaactccgcgtgttccaagcaaaagcagcagacagacgacagataagcttccccccgcaagaaggtattttcccatcccggcggtaatcgcgctgatctcaaacagcgacggcaggatggcgagaccgccaaaggttcctatcaccatcgtgatgcagatgaaggtacgcaggccgttaaacggaatacagctcttcaccacggctgccatgaaaataaagatcagcagaaaatacatgactgtctgccgctgctccaccgtaaacggagcaatgatactggtgactgcgaccatcgccgtgactgtgagggcaaacggcagcgcattggataacgccgtctttaagaatctgccgcgtatcttgcgcgtgtcggattcccagatggtaaggaacgacggatacccctcgattgccgcatccagcacagtaatctgaatcgggataaacgggaacggaatgtttgccagcaggcagatgaccgaaaccagcaccgagtagatggtcttgataaagaagacgctcgccgttcttgtaacattgttcacgactttccgtccctccatcacgacctgcggaaggttggtaaaatcggaatccagcagtaccacctgcgcgatctggcggctggcatcgcttccgtccgccacggcgatggaacagtccgcctcccgcagcgccagaagatcgttgactccgtctcccgtcatggctacctgatgtccctgtcgtttcagcgcacacaccagttcctttttctgtcccggcgtcactctcgcaaacaccgcatactgccggcagatctgatcgtaatcaatgtcctctccgagcgtcgataaatccacggcatccttccaccggtgcagtcctgcccgctttgcgatcatggagaccgtcttgacatgatcgccggaaatcaccttgacgtccacgtcttccctgtggaagaagtcaagcgtctccctggtgttctcacggatggtatcctccaggacaaccccgtagagcggctgtatctcttccggcagcgccgcttcgtcctcccactgcatcgggagatagcccacaatgatgacccggcagccctcttccagcttctgctccagttccgccggcagctttcgcatcagcttttccggcgcgccgataaaaacactgcccgctcccgcaaaactgatacatccccatttgcgctttgacgaaaacgaaatcttatgtgccggtgtataaaatgcctgcccgccaaacgcctctttcagcacctggaatgtcgcattgttgtcgtcggaggccgccagatacgactgcacgagtttttccggttcgccctgcggcaacgcctttccagagagccccgcgctgatctccatgacggcgtccaccgtaagctttccgtttgtgatcgttcctgtcttatccagacacagcgtatccacatgcgccagtgtctccagggagtaaatattctgaacgaggatcttcatttttgccagccggatgactccggtcgccagtgaaatcgagattaaaagtaccagtcccttcggcagcataccaagaagcgccgcggcggacgacaccaccgcttcccgcatgggcgcctgccgcagcaggaaggcctcgaaaaacagaatcacacccaacggaacaatcagcatactggtaaaccgcgttaccttattcatagagccaagcagttccgatgccacacgtttttccttttttacttcgttgacaagctttgtagcataattttcatttccgacatgcgtaaccttcgcatatgccttaccggaaatgacagagcttccggaatataactcacttccagcctccttgaccactgcatcactctctcctgtgagcagcgattcattcacttccagcatgccttccacaaccaccgcatcgttgcagatctgattgccgctctgcaacaccatcaaatcaccctttacaacctcatccagctcgatttgaatgtcctttgccccgcggcgcacacatacgcccggacggtttagaatcgagagttcatccaccagctttttcgcctttagctcctgtgcaattccgaccgcaatatttaaaaaaattaccgccagaaacagcatatttgtgtaagcacccacggcaaataaaagccctgcaatgataaagttcagcaaattaaataatgtaaatacattttcacggacaatctgcgccctgctttttgtaatacgctctgcggcagcgccgccttccccgcgctcgcggcgttctgtcacttcccgcgccgacagtcctgttatattcgcatccatgatctgttcctcctgttttgcttcggatcgtaatgtgagacattttccaatggtaacatgccaaaccgccgctttcaacgattgtcaacgtttccatacgccgcagcccgtttttgtactctttcttgatacctgtgtaaggtactccccataagaatggaactgccgcaataagcatatcgcgctttggggtgataagtaatattacaggaaaaccagagacaaaaaagttccagaataaacagacggcggcaaaatctttgaagcaaaattcgtgtatttcttccataccgcggctggcatcccattccgtgtctttgccacgtttggacactctaggagtgtgtccgacaagccgcagacaatgagcggactttctggtgtccctaatggcacctcttcacagacaatataaaaccgcgcgaaccgaaactcgtcggcatctgctattgaaaataaggcagatgccgactcagacatcggcttcgcgcggttatgttttgttcagaggtggccataagggacacacacaaaagtcctaaaattgtctgccggcttgcggacacaatccgtagagtgctccaaacttggaaagacatggatcatcacggatgccagctgcggcatggttagaaataccagattttgcggtcagatttgccgccgcatgtttatctggaacttttaagtatctatttctaataatattacttatcacccaaaagatgtctatgcttattgctgcagttccatcctattatttttccatattcgcaaactttgtgtactgcggcagccataccagattgacggttccgatcggaccatttctctgcttggctatgatgatctctgagattcccttcatatcggaatcatggttgtaataatcatcgcggtaaatgaacattaccacatcggcatcctgctcgatggctccggactcacgcagatcggagagcatcgggcggtgatccggccgctgctccacggctcgcgagagctgggagagtgcaatcaccggcacggaaagctctcttgcgagcgccttgagggatcgggaaatatccgaaatctcctgctgacgggagtcggtcgacttcccggaaccggacatgagctgcaggtagtcgatgatgaccagcttcagatcatgctctagtttatattttctgcacttgcttcgcatctcggaaatcgagatacccggcgtatcgtcgatgatcagctcggaattaccgatggttccggctccctcgatcagcttctcccagtctgcatccgagagattaccagtacggagcgcctgcgcatccactctggactccagagagaacagacggttgacaagctgctccttggacatctcgagcgaaaagatggcggtacacatattttcgtgaaatgccacatactgtgcaatgtttagtacaaacgccgtcttacccatagacggacgcgccgcaatcaggatcagatcggacggctgcagaccagcggtgcgataatccagatcaataaatccggtcggtattccggtaaccgttcctgaagtctttgccgcgttctcgatcttctcgagggcattcataacaacctgccggatcggcacgtagtcgccgcctccgccgcgggtggagagaaggtcgaataccttcttctcggtgatatccatgactgtctcgacactttccttgccgacataacactcattctcgatctcttcattcagcttgatgagctttctgcgcatcgagttgtccttgacgatctgcgcataatacttcacattcgccgaagtcggtactgccgtcaccagatcccgcacaaactccagactcgcaatctccggcggaacatctttttccttaagcttgttctgcagtgtcaccagatccaccggaagtcccttgttgtacagttcaatcatcgtatcaaacaaaatcccgtactgcgtgtggtagaagtcctcgctgatgagcatctccatcgctgtcacgatggcatccttatccataatcatggaaccgatcacggactgctccgcctcaagactgttgggcataatccgctttaccagtgcctcttccatgaaataaacctcctgctactcttctacaacatgaacggtaaatgttcccgttaccttcggatgaagcctgatggcaacctctgtcatgccgaagcttctgatcggctccggaagctgcatctttttcttgtcgagctccatgccgagctgctcctttgccgctgccgcaatctccttcgtggaaacagatccgaaggtacgtccaccctcgccggctttcatcttgaccgtaattttcttatcctttaattcctccgcaagcgcaagcgccgcctcgtaattctcctgtgcaaccttgtctgcgtgctggttctgcaatttcagatcattgaggttcttcggtgtcgcctcaagtcccagctttttcgggaaaatcgcatttctcgcatacccgtcactgacgttcaccacgtcgcctttttttcctaatgcctttacatcctgcaataaaattactttcatatgatcctcatttccgcgcattctgctgcgcttatcttgtatttcccaaatcgtattattcctcgatgtcgccttcttttaacatctcgtcgatcgtatcctgaatgatgtgctttgcctgcagcaccgagcagtctgtcaactgcgcgcccgccacattcagatgaccgccgccgccgagccgctccatgatgagctgcacattgatctcgtcaatcgaccgtgagctgacataaatcttgccctgatattcggtcagcacaaacgatgccttgataccgacgatatttaacagctcgtttgccgcctgtgcgcccacaatcgtcgggctctccacattatccgccgggcacacggagatcgcaaatgcaccgcggtaaacctccgcgtggcgtaccgcctccgctcttgccttgtaggccgccatgtcgttgcgcagcatcttgcgcacgcgcgtcacttcggctccggctcttctcagatatgccgccgcctcgaaggtgcgcacacctgtcttggtcataaagttgttcgtgtcgatcagaataccagcgtagatacagtctgcctcatgcggctccagcttgatattctcggaaaaatactgcagcacctccgcgatcatctcgcaggcgctcgacgcatacggctctacataggaaagcaccggattctcgatgacctcgctgctctgtctgtgatggtcaaacacgcacaccgtatccgtgcgttttaacagctccggacactctgtataactcggccggttcacatccacaaccatcacgagcgtatcgcggttcgtcagaagaattgcttcctcgctcttgataaagagatccgccggatagcctttttcctcggaaaatccttccacaagcggacgcagggaagatgtcacctcatttaaaacaatctgcgcctttttgccgagcactctggctgcgcagtacacgccgatcgcagcaccgagggaatccacatcgctgatgctgtgtcccatgataatcacatgctcgcggctctcaatcacctcccgcagcgcatgtgccttgactctcgccttcacgcggttgttgcgctccacctgcttgttggtcttgccgccgtaataagtcacatcctcgttgtcgcggacaaccacctggtcgccgccgcgtccgagtgcaagatcaatcgccattctggcgtactcgtaattcttggtgtaggaatcgccgccgacgccgataccgatgctgagcgtcactgccatctcattgccgacttttaccgtcttgacgtcctcaatgatgctgaaacgatcctcccggagctttccgagatattgattcttaaagacaacaaaatacttgtcattctcgatctttctgacgagtgcatcaatctctgtaaagtatttgttcaccttccggtcaattaacgctacgagcagtgaccgcttgacgtcctcgatactgtcgagcgcctcgtcataattgtcgatgtatacaagccccgccaccagacgctgttcctcgttctcgcggatataacggttcaactctgtctcgtcaaacaggtacatcgccgtcagatattcattgctctcatcgagcgatacaatcgtactgtcgtgtgtcatggcatcgaaataaatccgctttaacgccacacggtaataccggtcattgtatgtcagattgatcgactccaccggctcgctccgctgcaacagctccttggtcagcgtcgggaataccgtcatgaccgacttatgatacttcttgtcttttcctgtgacctccgtaaactgctcattcacccacagaaactttgcattataatcaaccagtgcatacgggatttcaaactcatttaagagctgtttctgcacgagaccgtactgcgtcgcaaaattgatcaactcatcgatcagaagcggcttattgcgcagataagcgatcagcatgatcacaaaatagagcagtacaaacccagaaaaaagcactcccgaagaagtgtcttccatatacacaaacacattgatgataatcagaagcattgtaagcagcagcggcagatacaaatatgtacgaagctttcctttaatctttacgttactttttctcacaagcaagcctccatcattctatacaaaaacactatcataccgtgcattataccattttgaccgcccaatataaagccttttttgcccgaaaaaagactgcccacaacaagttggacagtccaaaatttcagccgctatatctagttggtttgcgctttatctagttgccttgcgcttcgcttccgccatcttccgccggcgcgagcgtcatgtaattccccttatccatatcgtcgataaagttgttggagatgatctgggtgccgtcctgcggctccacctcatccacaacctcactcagatctgtctggtatcctccattcggattataatggcagatacggtatccatcttccgctccacgaccgtattcctggtaaataatatcatgccagccgttcgtcatgcgctcactaaccgtcaccggcgtgtggattccctcaaacgactcgatcacctggaacgttccgtctgcctgttccgataagatcaacgccggatcaccgaacgatacctttgtatactcaccgaccacgacaacgaaaatctcatctgttccatcctcattcagatcgatatgattatagtaataccgggtcttgctctgctcttcgttcggaatctgataataagagatcagaaactccgctagcgccggatccggcgtctcctccgcgtactgcgagaccactgtcgccacatcctccgcatcctccgccgcaaggaaatgctcttccagcacctgctcaagcgtctgctccgtctgttccacctgctcggtctgcgccgtctgctctgcctctgcgtcattcccgccgcatcctgccagcatcagaaccattgtcagcatgactgtcgttttgtaccagtgtcctctcatccgcgttcccactcctctgcacctcttgctcttacacatacccataatattatatgattcctgtctcatttccaagcccatttttctattcttaaggaaagttttagaatcagtggcattacgaaaatgcaatcacataaaaaagaccagcaatcggaaggattgttggtcttttacttatcagcttattcgctgcgattaagtaaaacttattcgcatacgtacggcatcaatgccacgtgacgtgctctcttgatcgctacagtgagcgctctctgatgctttgcacagttgcctgtgatacggcgaggaaggatctttcctctctcagagatgtatctctttaacttgttggtatccttgtaatcgatcacattgtccttaccacagaatacacaaactttttttcttctatgcatcgggcgtctcttcattggagcgccttctttgtctgctgccttattgaaagccatgataattacctcctgttattatcgtccattagttaaatggtaactcttcatcaattccgtccggaatattcatgaagccatcacctgctgcactgctcggtgacggtctgtcggaaggagtaaaaccggaattatctccgccgccggaagaattcttgctctctgcaaactctacattctcagcaacaacgtccgtcgtgtatacacgctgtccgtccttgttggtgtagcttccggtctgaatacgtccctccagaacgaatttagttcccttacgtccgaatctctccagaaactctgcagttctgccaaatgcgacgcagttgataaaatctgctgtctgctcgtccccgtcacgacggaaacgacggtctaccgcaagcgaaaatcttgcgatggcggtggagttctcaccctgtgagtaacgcacctctgcatctctggtcaatcttcccataagaatcactttgttcatatacgattcctctcttccctcaaacaaacgttatcagttcaaagaatctcttatttctcgtcttttctcacaactaagaaacgaagtacgttgtccatgatacgaacatcctgctcaacttctgctggaacagtcggctctgcatcgaactgaatgaagtagtaatatgcttcgctcatcttctgaacttcgtaagctaacttcttcttaccccagtcctctacttctgttacagtaccgccggcacgagtgatgtactcttttgccttctctactgtagctgttctcgcatcgtcttcgatctttgcactgacaacgagtgctaactcatacttattcatgcgaatttcctccttttggtctctggcccacgttttcattacatgagcaaggaataattattatatcacgagcatctactataacacgttttctccgtaattacaagtgctttcctgaaaaaagcgcaaaaaactgcgcagcgtgcctattctgtctcccccgtcttgcgcagtcctctggtatttttctccacgagctttcttgcaatcatgatctggtgcccgcagcccgcacacttcaggcggaaatccgcgccgacgcgcagaatctcccactcactgctgccgcacggatgctgctttttcagctttacgatgtctcccacttcataatggtactggttcatggtcttcctcactttcctgatgtagtgacagtgtagcatgtttcgctccgctgcggtagaaaaaatttcatttgccgcgcgtccgtctacacctcaatctgcccgaacacgtcgccgagtcccgcctgaatcagcagatctgctctcgcgtccatcggcgtcgtcgatttgttgattaacaccagtttgtttccccggtaataatcaatcagaccggccgccggatataccgcaagcgatgttccaccgataatcagcagatccgcatggctgatataaaatacggcatcctccagcgtctgctggtccagtccttcctcatagagtaccacatccggcttgatcgtaccgccgcaggcatcgcacagaggtacttttcccggataatccctcacatactccgcatcaaatcccttgccgcacttcctgcaataattacggtgcacgctgccgtgcagttcaagcacgcgcttactacccgccagttggtgcagaccgtcaatattctgcgtcacgacggcttttacttttccgaccgcctcaagctccgccagctttttatgcgtgatgttcggctctgcggcaaggcagagcattttgtcccggtaaaaacggtaaaactcctccgggtatcttatataaaaggaatggcttaatatcgtctccggcggatagtcatatttctgattgtaaagaccatccacactgcggaaatcaggaattccgctctccgtagatacaccggctcccccgaagaatacaatattgtccgactccttcaccatctgcaaaaattgttcgatattcgtcattgactggcgcctcccattccactgcgattttctctatcatacaccaatcgcccgccaaaatctatcggtattccgtccggcagagtcccaaaccgttttctaaaacgcagacagcagatacagcagaacccagatctttttgataaagcaaaaaaacagcagtcatgggactgctgcctaaagagttgcgggaataggatttgaacctatgaccttcgggttatgagcccgacgagcttccagactgctccatcccgcgctatatgcaaccaccattgcttcctgtatcacaatgtccgttgcttgttaacataatgtattataactctttcgtacccacttgtcaaatccgcttccgcaccctgctttttcctgccttactctatcattatatgcagtgccgacatcctatagaaccgattttttcatttttctgttttcacagacatttttgcagaaaaaatccttcccgggcgcagccacagccggcggctgctcacatatatcccgccagaataatgcttgcgacggttcccgcagtggttgcgatcagcgcgcccaccagcgtgtaacggctttttttgatccccgccgccataaaatagaccgacatcgtataaaagatcgtctccgtgctgctcatcatgatggatgccatctttcccaacatcgaatccgcgccgtactccttatatatatccaaaagaagaccggtcgccgcagaggacgagaacattttgaccaccgtgaccggtatcagctccggcggaaaacccagccagccgatcccccgtcctagcagcccggaaaaacactccagaaaaccggaagcccgcagaatcccgaccgccaccataagcccgatcagtgtgggcatgattccgatgaccgtctgaaagccgtcctttgccccgtctatgaattcttcatagatattctgtctgttcagaattccataaccgacaataccgaaaatgagaagcggtatcattatgtccgatagaaaaatcattacgcccatgatacatccagaatcttccgttattctactatatggaatccgaacggtaaatattcatattcacgaactttcgggctgcggcatgtcatgctgctcttcctcatcgtgattcgtcagcttctcatactgatcctgcgacatggggcggccaaaataataaccctgaatatagtcgcatccgaggtcatttaagaaatcgacctgatgcttttcctccacaccttccgcaatgaccatcatatccagagattccgccatccggatgaccgcctcgatgatctttgcacccttttccgcggtatttcccttggaaaagaacttcatatcgatctttaacacgtcgagatccacgtcctttaaaatattcaaggaggaatagccgctcccgaaatcatccatcagaatcgtaaacccggcgtcatgcagataattcaccgctctctggatcaattccgcatcctcggaaaaaacactctccgtcagttccaggttcagataatgcggcggaatatggtagcgttgaatgaggtcaattagggaatccataaaatccgggttgtagaggttgactctggatacgttgaccgaaatcggcgccggattccttccctgggaaagctcgctgtctatgaactgacagactttctcccacacataatagtccagcttcgtgataaagccgttgcgttcaaagatcggtataaattcgttcggaagcacgatctcgccgttcggcttcttccaacgcaccagtgcctccgctccgtacggagccatctttttcagctgatacttcggctggaaatagacgataaactgctgctctgccagcgcggcatccatctcgtcaatgatatgctgctcgcggagcattttctgtccgatctcctccgtatataaaacgtcgtgaaccatgtactgacccttgcactgtgccgccgcaatctccgcattgtcgtgcatcgccgccacttccatatccggatcgtccaccagataaatgcccgcgcaggtctccagataataatgtacggtgtgtttccggatctctgcccgaattccttccagtatgtggtagatcgccgcaccgtcttcgtaggggacacacattccgaacacatcgccgccgaggcgtccgtatgtgcctctgccgtaggctgtcatgaccttgcggatggcccccgccacaaaatggatcaggcggtctccctctttggatccgtagagagtattgataatccggaaacggtcaatgtcaaaatggataaaggcaaaattctctcccgcgcgctgatccaaaagctcgcgcgtcgcctggtagaacttctgctgtccgtaaatgccggtaagaaaatcatattccagaaaccgcaccttgcttttctcgatggcattacctgcgcgcagtctcatgatcccgggactggaattcttcagaacaaaatcccatgcaccgagctccagactcttctgctctctctccgggtcatcttctgtcgtgcacaccacaaccggaagatagctgtactccttccgcttccgatacatctccaaaaattcataaccgtccatcaccggcatcatcagatccagcataatcagtgaaatctgtgctctttttctggaaagaatctccaacgcctgctttccgttacatgcctcgaggatgtcgtaatccgatctcaaaacatccgccactgccatccggtcctgctgacagtcatctacgatcagtacatatttttttctacccatataatcccccgtaccttgaaacacgatctgcgtttctcttatgtactattatagatttttcgtttcctttcagcaacgtttttttaacttacaaaagataattgccgccgcggtactacatatagtcgcaacaagtcccggacccactactgctgcgggattgacgctcccgtactgactccggtacgcgatgatattgaccggaatcagctgcagggaagagatgttgacgatcagaaacgtacacatctcatccgtggcaatatccggcccgcgtttccgcgaggttcctttttgtccacagagttccaggttacgctcctgcaatgcctccatcgcttttaaccccgccggcgttgccgcccagccaagtccgaatacattcgcaatcatattcatcgcaatgtattcgttcgcggggtgttcctgcgggagatccggaaacaggaaatgcagcaccgggcgcattctccgtgaaagtccctcaatgatccccgccttttccgcaatccgcatcagtcccacccagaaagacatgactcccatcatggtaatacacagcgtaaccgcctcttttgccgaatcgagcgccgccgtcgtaatctgcggcagggttccgtggaatgccccgtagatgatgccggtcagaatcataaatgcccagagataattcatatcccctcactcagttttatcgtttcttcatatatatgcatcccggaataaatcttgacagcatcccgttgatgcgcaaaagcatcgcaaaattttgaataactgcatcttttcccacatagaatatgttaattttccggcacaggagttttcgcctctgccgcgtttccgaggtgtttgtttgcattcttcgtttatccacacattttccaggcaattcgtcctttttccactgatcacatccgtttttctgctcaacggatgctcccgcttctccatgcagacggatttcgtcgccggttccacgtcctccttcgatacgtttcttgatgattttttccgggcggaggtctcctccaacacgatcaatcttcatttttcactgtcccatccggaaaactacggcattacagagactccgatcacgctcggcagtctctcggaagaagcacttgccgcatcccatgcatctctggagaacacgctcgcggctctggcaaaatacgaccgcgatgcccttccgccctccggtcagctcacctatgacgtcttgcagaattatcttaagacggagctctccgcatccgatctgactctctacgacgagccgctgcgccctacgaccggcattcagtcgcagcttcccgtactatatgaggaataccgtttccggcagccagccgacgtggaggactatctcgcgctcctcgccctgaccggcgattatttcgaccagatcatccgcttcgagcagcagaaagcacaggccgggctttttatgtccgactatgcctgcaacacactgatttcacagtgtaacgccttcacagctgacccggatcaacactatctcatccagaccttcgatcacaaaatcgatgccatgtcagaattgacggaagaccaaaagacactctacaaggaaaaaaatgccgctctggtgcgggaacatgtgcttcccgcctacacccatcttgccgcggcgctcacagagcttctcggcagcggcaaaaacgatatggggctctgttactttgcagacggaaaagattactaccgctacctggtctgccacaacaccgggagcgcttccgatcttccggcgctgcaagaccggatcttagaaaaacggcaaagcgacctgcagcaggcggcagcactcctctccgaaaacccgcagttaaaagcatcccagacgaccgtccggcttcctgccgccgatcccattgcaacgctaaacgggctgcaggaggcgatgcgcgcaaattttcctgcaccacccgagaccacatttactgtaagttctattgacgagtgcatggaagactatatggcgcctgcgttttacatcacctcgcccattgacgattatgcgcagaactccatatttatcaatgcctccaccgacacctcctccctgcggtatttcacaacgctggcgcacgagggcttccccggccacctttatcagacggtgatgtcctatgaagccggactacatcccgtgcggtttctgctgaattatccgggctatgtcgagggctgggcaacctacgtggagatgatctcgtaccattatgccgggctggatgatgacctcgcctcgctgctctccctgaatcagtccgccctcctaagtctctatgcctcaacggatctgggaatccactacgacggctggagcttttccgacacaaccgctttctggaaagacttcggcatcacggatcagaccgcactgcgcgaaatctatgagctgatcgtggaagaacccgcccattatctgaaatactatgtgggatatatggaatttgtggatttaaaagaaaaggcacaggaaacctacggaagcgcctacagcgatatcgcttttcataaggctctgctctccatcggtcctgcacctttttcgatcattgaaacgtatctggatgattattatctgccggatgcggctccccaatagccccggcgcagcttatgcgtcacatgtatcgtttccaattaaaccaaaatgtttttgcgaattgtaatatgatattggtaaaaaacgccgcaacacggtcatccccgtttgcagcgttttctaatataacacagtattttcgtttatgtaagtattttttaagacaacagcgcctggtagacatcgcgcttgctgatgccgcggtcctttgccaccagcttcatcgcttccttccggccgatcccctgcttctcatagacttccatatgatcctcgagagacaggttctcccagttcttctgctcttcctgcttcaattcctcaaatgtctttccggcgattaccaggacatactctccgcggggttcattgtctttataatattgaagaatctccgagaatgtcgttaatgtcttttcctcgtaccgctttgtcagttccctgcacacggttaatttgcggtctccgagcgtctcatacagctcttccagcgtgcggatcagatgatgcggcgcctcgtagatgatgatcgtgcgcgtctcattgaccagctgcgagagcactgctgcccgctcttttttctccctcggcagaaacgcctcaaacgcaaaccgtctggtcggctgccccgacatcgtgagtgcggtgatacatgccgccggtcccggcagagacgtcacctcaatcccttcctcatagcagatgcgcacgaggtcttcccccggatccgagatccccggcgtccccgcatccgtaatcagtgcgatgttgagtccttcgcgcatcttatccaccagctgatacgctttctcgatcttattgtactcgtgatagctcgtcatcggcgtccggatctcaaaatgattcaacagcttgatggaatttctggtatcctccgccgcaatcagatcgacttcctttaaggttctcaccacccggtaggtgatgtcctccagatttccgatcggagtggcacacaaatataactttcccgccataacttttcctttcgtcgtgcataaagcgcgcacatcctgtatacttcccgcgtgcattcctgcctgctatccgacagacttctcctctgccacattccccactcctgcaagcttcggtgcaacgaaatacagtacgattcctccgatcaccgcgccgatggagatcaactgcgacgtggacagcacacccacactgcctctgtaatcgttgcgcaaaaactccacggcgaatcttccgattccgtacagcacaagataagccgccgcaacgcgtccggccttcggtctcttcgatgcaaaccataacagcagcgcgcagatgataaaatctcccgccgctgagatcagctgcgtcggtatcagcttcacaccgttcggtgcgaacgaggagttatgaaacgtgattccgtaccacgcatccgtctccctgccgtagcagcagcccgcaaaaaagcagccaaagcggccgaagccttgtgcaaacgaaaccgccggcatcaccagatcaaaatacggcataaacgcctgctttttcgtgcggcagtagatataacttgccagaattcctccgatgattcctccgtagaccacatagccgttcttgaaatcccagaggatagacggatccttcatgatctccggaatctctacaatataatataaaatcctggttccgagcattccgccgatgatggcgcagaagaaaatgccccagatgatatcctcatcatagcctctttttttgccccggcgcaacgtcatcagcaatgccgccagaaaacccgctgcaatcatcactccatacatatgaatggtaatcggtcctatcgcaatatcattaaacatattcttttcctttctgccacagcgtcctgtccgctgctttctgtgctgtcacaccggtcgttcgttaatatccgtagatatcatagatttcatccgtgtatacaccctgttccttataaacgatcagcggcttttccaccgtcagtctcgatctgccgccgcggcttccctccagcagaaccatgttcggctccttgtccacgtacggatagaccagctgcatccgcttgggttcaataccgcaggcaaccatcttgctcataatctccgcaagccggaacggacggtgtaccatgtaaaatctcccgcccggcacaagcagcttcgccgactcccgcagaatatcgtccagggtacacagaacctcatggcgtgcaatcgcttttgcctccgagccggaactgattccgtgctgtccgatcatatacggcggattggtggtgacaatatcaaaagaagatgccccgaatattcccgaggcatctttgatatcgcctgtcacaacccggatcttttcttccaggtgattatataatacgcttcttctcgccatatccgcgctctcttcctgaatctccagcgcggtaaaatcttctgcctccgtctttgcctccattaagatcgggataatcccggtgcccgtccccagatcaagcacacgctctccccgtctggcacgcgcgaatcccgacaacagcacggcatccataccgaaacagaatctcgccggatcctgaataatatagtagccgttccggtgcagttcatccagacgctcgttttcatggacaagattatttggtgtcatcaatcttggattttcctcccttatcctcaagcgcggacaattccttcagctcctttgcagaaagctttatattttcctttctgcggcgcggacggaacttcagctcgtccactggatattcccggagttctttttcatcgtccacctctaccagtaccttcaccatctggcggagcacattgaccgaagacacttctcctttcagtccgtccaccgtcgtcacgcggtcgccgatacccggaagtctgctgttgagatactcgtaggtctcttcctcattcttcaggcagcacatcagtcttccgcacacacccgagatcttggtcggattcaaagaaagattctgctcttttgccatcttgatggaaaccggcgcaaattccgagagataggtgttgcagcacagcgcacgtccgcagatgccgattccgcccatgatctttgtctcatcgcgcacaccgatctggcgaagctcgattctggtgcggaataccgctgcgaggtcttttaccagctcacggaaatcgattcttccgtccgccgtgaagtaaaacaacagcttattattgtcaaacgtgtattccgcctcgacaagcttcatatcgagcttgtgcttggcaatcttctcgagacagatgcggaaggcatccttctctttttcccggttcttcgcaaccgtcttctcgtccgcctccgtcgcaatgcggatgaccggcttcaacggctggatgacttcctcctccgaaacccctttcggctccgtcatgaccgttcccatctcgacaccgcgggcggtctccacgattacgtgcattcccgcatggatgtccagcttgcccggtccaaaataatatatcttgcccgcattccgaaagcggactcctactacttttaccatatttctagttctcctttattgtcagcaacagcagttccattgtaaggtcaaagttgacgttggcattcagccggatctgtgctttgcgcagcgcctccaagatcgtctcgatgccgctgtaagaactcttctctgcctgccgcttgatgtcgtacacttcatccttgaagatcagaccgttcacgtcgccagttgccttaaacagcagcacgtcccgataccataccatcatcagatcaaagtaatcattgatcgaaagcttgtatgtagcaatctgttttaccgcctccgtcatctcatacaaatcgatgtcccgaagccgcttgatcagctggagcaccgcgccctttaactcgttgaactcctccgaggacgcaagctgaatggcttttccgacgttaccctgagcgaatgccacacatacgtccgcctggtagtccggaatctgatacttgcgcatcagatagccgcggatcttctcatccggcactgccttgatgttcaatgtgacacagcgggataagatcgtcggcagaaaagcggcagcgtttgtggtaagaagaatcagaatcgcgtaggcaggcggttcctcaatcgtcttaagcagcgcattctgtgcctgctcgttcatcttctcggcttcatcgatcatatagatcttatatctgctgctgtaaggtttgattactatatcgttgttgacctgggtacggatatcatcgaccgagattgtattcggcttctcatgccgcacatagatgatgtccggctggttcttcgtcatcgcctgcttacaggaatgacattccatacacggctccacatcggacggctgcgcggcatttttcaccacatcctccagcttctcacactcgagtgtctgggcaaacgcctccgcgagcatcattttgccggacttatccggtccgtttatgatgtatgcatgtgataccttatccattgtgactgcattctgcagatgctctatgatctgctcatgccctaaaatagctttaaatcctgccatagcttccctcgttttatgttaagtcagaatatccaacagaagtccctggatctccccgatcttgctcaagatcgtgatgtgatccttctcatccttgaccagttcctgtgcaagttcgtccaggttggcatcaatcagccggatcagtccgtagactctgtggcgtcccttgcggtccaggaaattctctcttgaaaacttatgagagcggtagaccacttcattcataaaatcacggatcagtccgcggtactttttcatatcgcggatgtccatatgttccgcaatccggttcccctgaaacgtaatgtcagataacagactgtccaccttcgcctgaagctctgcatccgtgatcgcgctcgccagcgtaaacttgaacgttccgtcgccggtctccgtcgtcaccgtgtccggcacctgcgttaccatctgtgcctgatttaccttaatatccaatctgccaccctctttccctgatccgtcaatcgttctgagacaatatataatcgcggatattttcttccgtctgctttaaatcatcatttgcaaaccgcaccgtaatctgtgcgtccaaaagcttttcttcggaaaaatctgccgcgtccgccagaaatctccggcacatctcttcatagtgcggttcccgctgctgccgctctcttccgatcgcacgctccagccggattccgtcctccacttcaatatatatcggaacaacacgttcctttccgaagtagtcccggagcttcccgtatgcttccagcgtaccgatcaacagataattctgccgcagatcctgtatctgatggtcatccaccgtaaaatacttccatactccctgcaccgtatcgtatgcccgaagttcaatgactttgccacgctttagaagatcggccagttccttctctccgcagaaataatattccacgccgtccgtttctccccggcgcatcggccgcgtcgtgtagggaatgatcttcttcagcgaaagcgccccgtcttccagaagcatcttatataatgtatcttttcctgttgagctcttgcccatcatgcaatagatttttcccattcgctgcaccttctagtataatatagtctttaaaaatatacaatctttatccgaccgggggcaagatttccctgcccttccacgttcagttttctctcccggcactctctgatgtgccggataaactcttccgtgataacttctcccggcacgatgagcgggattccgggcggatacaggtagacgtaatccgccgccattttcccgactgcctcatcaagcggcatctcccggtacggcagatccagcgcctgataaatctgcatccggcgcggattcttccgatacatacgcgccgtgaatccggcttccggcacttctccgtctaattccgtcttccggttctcttcagcggtctcatggagctccgccatacgccggttcttttcatcaatctcatggagcgccgtcacaagccgccgcatgccctcgtccgtatccataaggcttgtcatgccgagcacatagtccgccgacaccatctccatctggagatgatagtgtccgagcagttcctgatgcagcgcctcgccgcccatggcgcccgcataaataatcagcttggaatcgtcccagtcatacgcttcttccttgcagaggtcttcccgccgcatgacatgcagctgcgcaagatccgccgtatcacggtaaaatgcatccagacgtctccggtattccgcaaaaagttctgccccctgctcacggagcaggtcgatgcatgcatccattcccgccataaacagatacgacggcgaactcgtctcatagacgcccagataccgtgccacgcgcccgggatcaatccgcgtgccgttacaatgcaaaagcgccgtctgtgtaaacgacggcagcgtcttgtgcagactcataatcacggcgtccgccccaaggcgcaccgcattttccgggaatccggctccgaatccgaagtgggccccgtgcgcttcatcgacaatcagcgccgccccgtgtgcatgacagcatgccgcaatcgccgcgacgtccgacacgatcccctcgtaggtcggggatgtgaggatcacaaccgcaatatccggatgctttgtcagcgcctcctccacctgcgccgcggtaatctgtccctgcagatctccccgcgtaattgccggatagaggaactccgccgcgagtccctgcatggaaatcgcgtgatagaccgctttgtggcagttccttgccgccagtaccttatctccccgccgtgcggcagcgcagatggcggcaagcagtccgcaggtgctcccgtttaccaggtaatacgaccggtccgcaccgtagagcttcgccgcgcgctcctcggcctccctgataagcccttcggcatgatgcaggttgtcaaatccgtcaatctccgtaatatcgatggtgtacggatttggaaacggaagtgcccggcgcttgtgccccggcatatgaaaagggtagacatccgattccccgtatgaaattagctgttgatacaaatgctctctctccattgttcctgtcactttcccctgtcaatccgtcttgttttgtcccgtcgatccgcgcagcagaatttttgtcacttgaacattccaccgttttccattatgatatgggatatatttatttaatagaaatggcggaaatttttatgaaccacgcactcattatcctgtgcggcggcggaagcacgcgcatgggaaccgataaagccctgctgccttttggcgaagtaagtctgctggaataccttgtgaacaagtacaaaccgcatttttcgcatatttacttatccgtgaaaaagccgggcgaatatacacacctgtcactccccgtcacagaaattgccgatctgtacatgaacgccggtccgatgtccggcgtattttccggtctctccatgatggatgaagaccaggcgtttattctgccgatcgacaccccttttctggaaccagaagtcggactgcagctgctggagcatctggacggttttgacatcgccgcggtatccggcaccgaaacggatcaaaaagtaccggcgtccgcctactccaaaagctgcctgccatccatcggaaagtgtctgcttttgcaccagttcactttcgatacgctgcgcgagaaatgcagcgtgtcctatctgaagcgcgaagaagcgaccaaagactccgatattccggcagatcttcagttttcccatctggataccagggacgactactatctggcgctccggcaccttcactgcatttaactaatctaagaaccgctgcagatccggcatccagtctccgaaaaaaatctcgtcccggcacagggtgctccacatctgcggaaggaattgttccagaacctgcatgacctctgtccatgcgggttcttttcttttccggtgtcttaaatatttctcccaacgctttctcatgtagctgtaatcgcggtaggaaagaatctctttcatccgcgactcctcgggaagtaactgctgctttttgcaatgttcgccgagcagttcctgaatatgcctgccgtccaccggctccgtctttaatatcccgtaaaccttatcgtagacgctcatatccggaagcagttccatatcccggatcagataaaaaagattctccgcgagaatactctccaccggatattccagatacggaatctgctttccgccttccataaacggcataaaagtccgcttgaccggaaccaggccttcctcggtcagttccgtgacgcggatatggatcgggaccgtcatctcctcgaactcccccgcaatttccagatccacacggtgatctcccgcgctcgctcttcctttccaggaaatgtccggcaccttttccacttttaggatgtacgcgagcatgacatatcccatcttaagagacagttcctgccccggaacgatcccctcccgcttcatcgcgcggggatctgtcacataggcaaaatccagcgtcaacagatttttcttccggtactgttccaccccgagcgcaccgctgtttttcagccacagaaacagggaaaacggcgaatcctcgatcagatacatcagctcttccagtacatagcctgccagcagattggaaaacggaataccggtctcttcactttttgctttcagtgcagctttttctatgatcgtatgtttcatctacagccatactcctatcatcgtctgtactttctttaccactctgcgttcccttgcgtatttcatcaactttgcaacatccttcttcggatcgcggatgtacgctaaaagcccttctttgaaaagctcgcgctccatcttatcttcatatttcagacactcgcacatcaggcgctcccggtcaaaaattttcatcttcgcgccaccgtagtcaatctccgtcacaccgagtgtcagtgtctccggctccgcatacagcggcaccaccggcggaaaatccagcttaaaccgcgacttggacgtgttcttgtccaccgacaatttgtatccgtagggcttgcggttcagatagccgtaggcatacagcgcggtctccagatttaagacgcagtccggaaacagccgcgcaatcagctcctcctccgagaaatcactcagccgcaccgcatagtacccgttcttgatccggatcagatctcccttttccacaaaatccagaatccgccggtaatcgatccccagttcattcagctggctctttttcaccacaccgccattctgatagatgaactctttgacacgatccagaatgagttccctcttttcgttaatcacataagattctgacatatcgttccccgtacctttccttttgagccttcccctcctgccacgcattttggggaaagttctgtataacttctccgctcaatgtatatgtttgtggtatttattgcttatttttactataaaggatactctgctgtttgtcaatttatcgtttctgtcgtttttccggctgttcacagctcttgatttgtcttataatgtcataaaagacaatttttttgtcgtttgcagaaaggagttctctatggaagcaaaatcaccctccctgcgcaagaatccgtcccgggaaacctgcgagggaatcatccgccggatcctgatgaccgaggtcttagaaaagggaaaaaacgagcatttccgcacggctgccgatttcatgaaatattttgagtctctatacccggcgtccgacgctctgaccaaacaggtgcagcgcgccatccgctctctgaatatgccgaaggatgaactcggctatttcattccgaacaagactgccgaacagttagcgcaggagcaggagcttacctatattttcaaaaaagcaaatgccgacgtctgccggatggatgattaccagcctctgtttttaaaagcggacgatgctgtctcctcctacatgctttcccgcatcacggactcccctctgtttcagggaaaatatctgaccgcgcacactgtgtcaggcggcattcttttttacacaaagaacccgaatcaacttgaaatcctgctgaaaagcttaattgtcagataatttattatcatttttttcgtgtccataacgcaaaaaacgacaatattcaacatggaatattgtcgttttttgtttctctatactatcttctatgtcttctacggcgtcttgacttgctttttatctgtcggaactgctctttgcggttcctgcgcacttcccggttgtgccggataatataatagttatcgtagaacttctttccggcgaaaatcagccctgctgcaaccaggattccagctacgataagcaggattgtgagcggtctgatccgcaccgtggagaccgtcttctcctcggtgtctgtctcctgctctacctcgctctggttgtcaaaaatatatccgtccacaaccgcaccggttgtcactatgtctgcttttccgacctgacgtcccgcataggtgtaggcaagcgttcccaccacgttctcgctgacgtcattatacatgatctccgatgccgcatcgttaaagtcggtcgtcttcggaagaacgatattggcattcgcgtcgatgtccacaaacgccttgttgttatttaaggctccaacttccaccgcctcggaatccatgtatctggtctcattgtccgcaatattgaacaactggaaattatcaaatgcatagtcgaaaaggttccggctgtcggtccactgattcggcgattccgtatgcatcacgacgcataccagactcatgccgtccttctcggcgtaagtgaccagcgtgctgcgcgcgatgtccgtatatcccgtctttcctccggtacaatactcataccggtacttgagcgtcttgaacgggtagagcatctcattgtgattctgcagatccgtcggctcatcatgcttgttcgtcggcggaatggtgtagcgtgccgtccccgtaataatccggaaggtctcgttctggtatgccgctttggcaatcagcgccatatcgtgcgccgtcgtgtaatggttctcgtcaaacagaccgtgcggattggcaaaatgcgtgttggtacatcccagctccgccgctttttcgttcatcatgtccacaaaatgctccaccgtaccgccgacatgctccgccactgcgtaggcacattcatttgccgaattcagcataaccgcgtacaggcattgctccatcgtcatctgctccccgtaatcgcggtagattccggacccctcagtattgttgatcgcatcatcagaaaatgtgacgacctcattcagatcggaattctccagcgcgagaagcgtcgtcatgattttcgtgatacttgccggataattccgctcatcgctgtttttttcgtacagaaccgtccccgtcgacatctccatcagtatcacggacggtgactgtacttccggtccttccggccagtaatctgccgcctgcaccacctgcggctttatctgtaaaaagtatagtaaacttaaggcgacacatgccgcctttttccacacattcgctcttcgcattgcttataactccattctatccagaaatcctgtccatttcttccatatatatccggaacataactagtatcagtataatcgcagaaaaaaatacatgcaacaatttttctggcaaaagctctttttttatccacagatttattgtagaatatcttgtatgtccacaattataggacttcccgacatttattaagattttcttatgagaggcaggaacaatatgagacttagaaatataccgggtgcagacgccgccatcacagagagcgtctactgcatcaaaagccccgagacgcacaaaggccattggcaggagatttttccgtcacagcagccgcttcacattgagatcggtatgggaaagggccgcttcatgatggatcttgccgcagcgcatcccgacatcaattatctgggaatcgagcgctactccagcgtcctgctgcgcgccctgcaaaaaatggaagagaatccgctcccgaacctgtttttcatctgcatggacgccgccgatgtcgctgaggtattcgatcacggagaggtagaccggatctacttaaacttttccgatccgtggccgaaggacagacacgccaagcgccgtctcacctcccgtcagttcttcgcgcgctacgatgaagttctcgcaccggagggacgtctggagttcaagaccgacaatcaggatctttttaccttttccctggaggagatcccggaagccggctggcatctggacgcctccaccagagatctgcatcacgatccggtgctcaatgaaggcaatatcatgacggagtacgaggagaagttctcctccctcggcaatccgatctgcaagctgatcgcttccagataagaaggaatcctgcttgcaggattctccgcctgcggcggatcgcccttgcgatattcttcatctccgccgcagtgcgatccccgcgaagcttttttacttcataggacgcattttcctatgaagtaaaaacacccgcagtctggatttttctcgatccgcctgcgggtgttttttgtgttctgttttcttttattctttgatccggaactggttgacattgtcgcttaaattttctgcaatatccacgaggtttttcgtctgcgcattgcagtccgtgacgatgccgcttaactccgtcatggaagccgacgtctcctcggtacttgccgcattctcctgtgcaatcgctgccaggctctccatgctgctcataacatcattcttcgccgtgttgactgtctcgatctcacgccggatattgtcaatcgcaactaccacattgccgacctccgtattcagtccgtcgaatgcctctctggtggtcgaaagcttctcgttctgctcattgatctcatccagcacaccgttcatcgtctcgacgctcttgttagagttcttaatcagttcttccacaatatcaccgatcttcttcgcggagtcactggactgatccgcaagctgacggatctcatccgccaccacagcaaatccttttccatgctctcccgcacgcgcagcctcgatgctcgcattcagggacaacagattggtctggcttgcaatatctgtgatcatctggatcgcgctgccgatctccatgacagactggttcgtcctgtctgtctgacggttgacctcatccaccgattctctggtgcggtcgctgatctccaccagatctttgatcgtgccgtcgagcttatgattctgctctttcatctcctccgtgctgcccgtgagattttccacgttctttgtcgtctcggcaatggcttcgttcatgtcgctgatctgctcattgaccttctgcatctcgcccgcctgattcgtcgctccgttcgcaatgtcctccatcgctgtattcacattatgaatggactcattgatcgtcgtaaagctgttctggaacctggcgctgaaatcatccagcgactttgcggatgtccggatgttttttacaatcatggccagtccgccaataagtgaatacagcgcacgcgcaatatttccgatctcgtccgagcggctcgtcatgcggtcgctgatcttgctgtccagatttccctccgcaacatcgtccagatgatcgatcatcgacatcattgccttcacaatcttcatcatcacaattgccagaaagatacatgcaaagattgcaagcactaccataaatattatattttttttcaatcggtcattgtagatttcgtgaacggaagtagacgccataccggtaaacaccagacccgccatggaaccgtcactgttgtacaatccctcataatatccgtaatatttctgaccatcaatcacattatcggacacaaaataactacccttttctttcacagtctgatacacatctgctgctatctccgtcccggtctcacggctgccgtcctgtctcacaaggctagtcgccatccgggtcgtattccagctgagcgtaacatcgagtccggtattctccttaaaagcatccagcacatcctgatgttccgagatattgtaatctcccttgtacagctggtctccgtccacattccagtcgccgctgcttataacggacaaggtctgattgactgcataaatcgatgtcttcaattcatgctgcatcagtttatcagacacagaaacgccaaccgcccggattgccagccctgcaaaagtcacaagaatcagtagcggtatgattgccgtgatcagaatcttcatcatcagattcagaccttttttcctttgcacctcaatattcttttgttccatctgcctctctccccttcatatagtatctgttttttatatcgtcaggtttttccttctgttaaataggatacactctttttttaaattttaatgatatgtattataaatacaaaaaaagcaccaaccccacagtcaatgctgtaaaatcggtacctttcaatgcgccaccaggggttcgaaccctggacaccctgattaagagtcaggtgctctgccagctgagctagtggcgcttattttgtatctcgtgttctgtatcacccgagcacgaaaattattatataacagaaattttagaaatgcaacattttttttaaaaaacttcaatttttttttcaattgtgttattttatagatagaatggcatagatcaaggaggtttcttatgcaagttgaacagcgattattgaaatacgtgtcctattggacgacatcggatgagaataacatggcagacggcaagatacagattccgtctaccgggcgtcagtttgatctcggaaaggtactggagcaggaattacgggatctcggtcttaaaaatgtgattctgaccgaccactgctatgtgtatggtctgcttccggcaactgccggctgtgagggacacaaggccgttggttttatctcacatatggataccgcaccggactactccggcaaagacgtcaaaccgcagatcattccggattatgacggcggggacgtccgtttaaacggtaccggggcaatgttaaaggtttccgattttccaacgctgaaggatttgaagggaagaaccctgattaccaccgacggcacgacactgctcggcgcggatgacaaggccggtgtggcagaaatcgtcacagcgctcgaagagatcatttcttccggaatgcctcacggagatatctgggtgggatttaccccggacgaagaaatcggctgcggtgcagatttatttgacctggattattttaaggctgcttttgcctacacggtagacggcgattacgagggcgaagtcgcctatgagaatttcaacgccgcgagcgcaaaattttccattaaaggcgtcaatgtgcatccgggcgaggcaaaggatattatggtaaatgccgctcttgtggcgtgcgatatccagtcgcagcttccgccggaggagacaccagcgcacaccgagggcagacagggcttctatcatctgaccgacatgaagggtgatgtcgcttttgcagaactttcctatattgtgcgtgaccacgacagggcttcttttgaatcacgcctgaacagactccgcacactggaagtggagatcaaccagaaatacggcaccggaaccgtctctcttaccatcacggattcctactccaatatgcttgagatcatcgaacagcatccttatgttgtggatatcgccaaaaaggcaatctcgatgaccggtctcacaccgctctcccgcccggtccgcggcggtacagacggcgccagattaagctttatgggtcttccgtgcccgaatcttggcaccggcggctacggcttccacggtccgtatgagcatatcagcgtggagggcatgcagacagcagtctccgtcatcaagaatatcgtgacgatcgtcgcggagtctgatctgtaagattacggaaagaattgtcgcatagattcccgtaataggaagttccgggatatataaataagtattatcgtttcagatacaaaaatagcgtggaagaaattctcacattttacttcagagaatcttccacgctcattttttattctgaaactgctaataacttcatttcttatcccggaacctgctcttacatttttgcaatcaatgcggcaatttcttccggagtcataagcttgtgtggatcggaaaaatccatcggtgcagcttcctctgcctttgtctcaggctctttctgcggttccgccaccttcggctcgtccggtatttcgtcctccggcgcggctactggctctggctcgtccggtgcttcattctccggcgcggcttcctctttcagatctgctccaagatcgagactttctcctccgagatcggagccatctgctcctaaatctaagctatccactccgagatcaaggttctccgttccaaggtcaaggttctctgctccaagatcgagactatctgctcctaaatctaagctatccactccgagatcaaggttctctgttccaaggtcaaggttctctgctccaagatcgagactatctgctcctaaatcaaggctgtctcctccgaggtctaagctgtctgccccaagatcaagtccgcctgctccggcatctaagttatctgctcctaggtcaaggttctctgtcccgagatcaagaccgtccactccaagatccaggctgtctcctccgaaatcgagaccatctgctccaaaatcaaaactgtctatcgccccgcgctctgcctcagcctcattctgatcgtctgtggcagctgctgcatcttcctcttccacaatcgcgtcggaatctacgaccggttcctcatactcttccagcaccggggtgtcatccgtcaccgtctctgcatctacgaccggcagttcctcctccggtgtatccggcatgctaaaatcctcttccggctgtggttccatgaccagctccggctccgattccataaccgactccgattctgtcagcacttccggctccatgtctggctccggctccatgtctggctccggctccatgtctggctccggttccatgacctcttccggctgtggttccatgaccagctccggctccatgtctggctccggcttctgcgctgccgcagctgccgtgctttctgtaattttgctctccagcaccgcattctggctcaccagttcatccatccggttctctatagcggcaagcgtctgcgccttttcctctgcaaccgtctccttcactgtctgaagtccctcggtaatctccttaagccctgcggtaatctcctttaattcctctgcaaattcctgctgctttaagacgagttccttaacggaatcatccatcatgttctgctgctttccggcaaactgctcgaatcccgcatccatgctctcctttaactgtaagagattgtccactacgcggtcgttggaattcataagtgcgtctgcattttccttgcttctggtaatggtcaccttggcaatcgccttctgcgctgtgatgatctcctcacccggctctctggtattgcggtcaaccgcctccagctgctccgagattttcttgagcatcagatacgacgccttttctccgcgaagcatcctctcatattcgtcttttgcctgctctccgctcttatgtatctcctttaataaagcagcaataaatacataggtacaggcgagaattgctgctcccagaatgatctgcaccagatataaccggggcagattgacgataaaatacatttcaatcaacagcagcaccgttgctcccagcaaaaagaccggcgcaagcggcataccctttttctcacgtggctgattctctttcttatccatagtgtgtcctccgtggctttcctgtccatccctggcaacaggcattttatagtgttatattatcacagaacgtcaaaaacataaacggattttcttgttattttatgctgcagattttataatatatttcggacttattttcacattttttatacctttacaacagatatggagattatagcatgaacgaaacctcttccaagaacgaaatcacatccggtatcatctggaaacaacttcttttatttttctttcctattttactgggttctttttttcaacagctttacaacacgatcgatgccgtcattgtgggacgctttgtcgggaaaaatgcacttgccgcggtcgccggttcctccggaatggtcatcaacctgctggtcaacttttttaccgggctgactgccggtgcttccgtcatcgtctcccagttcttcggatccggggaccgcaaaaaggtggacgacagtattcatacgatctatgccttctccatcatcggcagcgtcatcatgacactgatcggcatcactgctgccccggcgcttcttcgactgatgaatacgccggaagaactgatgagtgattccattctctatctgcgcatttattttgccggtatcttcttcgtgtttatttacaataccggagcagggctgctccgcgcacttggagattccagacgtcccctgtactgtctgatgatctgctgcgtcatcaatattattctcgacctgctcctgatcgtcgggctgggactcggtgttgccggtgcggcgatcgccacgcttctctcgcagggaatcagcgccgtgatcgttaccgtctttctgatgcgccagaaagatctctgcgatttttccttaaaagagatccgtatccacccgaaacttctcaaatcagagttgcttttaggactgccgggcggatttcagtatgccatgtacagcatttccaacatgattatccagtccgcgctcaacaaattcggaaccgacacggttgccgcatgggcggcttacggaaaactggacgcgatcgtctggatggtcagcggtgctttcggtattgccatcacaactttcgtcggtcagaactacggcgccggaaagtatgaccgcgtcagaaaaagtatccgcgtgtgtatcggcatggactttgctgccgccatccttctgatgctggtgctcgtatgcttccgcattccgctcttccacatttttgtgaccgatgaaaatgtcgtggagatcggactgaaaatgatggcgaccatggctccattttactggctgttcgtctttaccgaggtcttctccggtgcgctgcgcggcatgggtgatgtcgtcgttccaatgctcatcacaaccggcggtatctgcctgttccgtgtggtatggattttcggagtggttgccctcttcccgacgctcaccgtaacgctcctcaattatccggtgtcctgggttttaacatccgttctgtttctgttttactatcatttccggatgaaaaagctgaccgcgcactgattgctccggcatctcttacttctctctgctttttgcgaagctgaccgggcggcatgccataggtttccttaaagctgcgcagaaacaccttatagttggtaattccatttttattcattaaataagtaatactctcgtccgtctgcagcagatcactgtgaaaatactgcaggcggatttgatttacataagtcaaaaatgtctggccggtgtactttttaaacagacggcaaaaatattccggcgtaagcgacagttcatctgccgtctcttttagtgtaatcgggttcgtgtaatttcttttcacatactgcatgctctgctcgatccgctcaaaatctctcctggagcggtggcgcagcacatgatcgaccgtggccgcatcctttgtatacagcagatacagcagcttataaaccgctgcaagaaatagcagatgcgtaccgtccgccgcctgctcctgcaggcacttcatttcttccagcttctgtgacatccggcaattcacggatgcggtctcctccgaatacggaacatattccccgaaatgcagtccccgccagtcctcactgacgcgctttaaatgctccggcggaatctgcagcagatagtaatgcccgtccccatggacatgcgtgtagtgaatgtctctcggattgacaacgagaatatctccccgctgcagttcatacgacgtctcattgatgtacgctgtcattgccccgtgctgcatacagatcatttccagatgctcatgccaatgtgccggcagcaattcattggacgcgtcgacctgcgtaaaatagagctgcatcagcccgtcatcggatataatctcatgttccccctgctgcactcccgctccctctctttcctgctctccccgtgtttttcacatgcacggtttctctttctaccatcataccttcagaaggaaaaaatatcaatatcgacccatgtttctgccaaaattcgatctataacaaacggaattatctgcttataatacgaacatagacaatgttccatgatggaaaatatcaaaataatatcaggcgtatgccggaaaagaggtcaaaatgaagaaatggaccagagtgatgtatcagccaaatcgtccgttaaaagagggctgttacgtgactgcttccaaagaacacatcgcactttccagggaagctgctgcagagggtatggttctcttaaagaacgagcacaaactgctgccgttaaaagcaggcagccggattgcactctttggaaaaggcagttttgattatgtcaagggaggcggcggcagcggcgatgtgaccgtatcgtatgtgcacaatctctacgatggctttcagatgctccacgatgccgtctccctctacgagccgctgtgcgatttctaccgcgccaatgtgaacgaacagtacgatcagggttccgttcccggcatgacgacagagccggcgctctccgccgggcttctcgccggcgccagcgcctataccgacacagctgtgatcgtgttgagccgtttttccggagagggctgggaccgctccagcatcgaatacaacggagaatacaatccatgggagacagagaccagcatgccaaaaatctctggagagatcttcccggacggcgatttttatctcacaaaggaagaatccgccatgatcgcgcaggtaaagcagcatttttccagaattgcagtcgtcttaaatatcggcggcatcatcgatacctcctggatcaaaaatgacgatcagatctcctccgcacttatcgcatggcagggcggcatggagggcggacttgccacggcggaactgctatgcggaaagatatctccgtccggcaagcttccggacaccttcgccgcttccgtggacgactatccttccaccgcggatttccacgaatcggttgactatgtggactatactgaggatatctatgtgggctaccgctattttgagacttttggggatgcggcaaaacgcgtatgctatccgttcggattcggactttcctacacacagttttcccttacggtgcagagtgtgaccgaaaccgcgcaggccatccgcgcttttgtccttgtcacaaacaccggagattacagtggaaaagaagtcgtgcagatgtattacagtgcgccgcagggacttttgcagaaaccggcgcgcgaactttccgctttttgcaagacaagaacacttctcccgggcgaaagccagcttctgacgctcgagacagcgaagaattccatggcttcctacgatgatctgggaaaaatttttaaatcctcctacatactggaaaagggcgactaccatttttacatcggaacttccgtccgggatgtcacagcgctggattatgtcatgacgcttaacgccaacctgctggtagaacagctttcctccaaagccgcacctacaagcttgaagaagcgtctgctcgcagacggaagctacgaagagcttccgcagggaactgccaacgatccgaatgcctgtgtttttgaaaaaatggtaccgggcaccgaggaggctctcgccccggcaacacgcggacgcggctcctaccttctgctgaatttctataaggaaaacgcgcatccgctgatcgacgtttacgagggaaagatttccctggatgaatttaccgcccagctcgataatgatgacctaattcatctgctcggcggtcagccgaatacctctgtcgcgaatacctacggctacggcaatcttccggaatacggcgttccaaacatcatgaccgccgacggtcctgccggtctgcgcatcaccccgcagtgtgaggtctgcacaacggcatggccatgcgccacactgctcgcctccacctggaatcctgccctggttgagcaggtcggaaccgcaggcgcagaggaagtaaaagagaacaacatcgccgtatggctgacaccggcggtcaacattcaccgcaatcctctctgcggaagaaattttgaatactattcggaagatccgctgctcaccggcaaaatgggcgcagccatggtgcgcggcattcagtcgcagcacatcggcgcagccgtgaagcattttgcatgcaacaacaaggagaccaaccgcaagcacagcgactcccgcgtctccgagcgcgcactccgcgagatctacttaaaggcatttgaaatcatcgtgaaggaagccgatccgtgggtcatcatgtccgcttacaatatgatcaacggccaccgcgcttcggaaaatcacgatctgctcgaaggcatcctgcgtgacgagtggcattttcaaggaatggtaacctccgactggtggacgagaggggaacattacaaggagatcaaagccggaaatgacgtgaagatggcgtgcggtttcccggagcgtgtaaaaaaagcgatggaactgggtgaactggatcgaagtgatctggagcgctgcgcaaagcgcgtacttgatctgatcttaaagatcgattagaaaactcattcttcctgctgtagctaaaaagacggaagcctctcacagagactcccgcctttttgcttttcgactatagatattttccgatatggattcaaccgcagcagctcctgcttccgccccgcctctctggaagtttttgttgcagtcaatccgtgcggttccattggcagctgcagctacttcttcgtttctgcagaatccatacaaccgttgcaggatgcagcgattctatcatccggccacgattttctaagcgccgcataggaaatcaggaagtttgccaaccagcccgccggtacggcaagccagacaaatgcaataccaaagcgcggtgcaaaaatcaaagcaaccgacagacggatcgcaaggtttaccatattagctataagaaatggacgcatgattccaagtccacgcaaaactccatccgttgccattttaatacccatgaaaataaagaaatagccaagccatctcatgtaatccccggatacctgatatgcgaaagcagttccgtcttttcccagaaataaggaagaaatctgggtgtgcagtgtttcaataattataaaagccagaactgcaaagcacagatctaacaccagtgcagcgtgataaccttttttaatacgcccgattttctgagcaccaagattctgggacacatacggcgaaactgcattgccaatggacacaaatatcagtgagaaaacattctctactctcattgttgccgaataacctgcgagtgcctgtgtaccaaatgggtttacaactgcctgcacgatcatcatgcctattgatactgtggactgctggagaactgacggtatggcaatccggagcatataatgtaactcctgtccgtcaaaccagtgaaatggactcttatattggcgcatccggtaaaaaaagatcacgaatgaaaataccgcagaaatgccctgtgcgatcaaagttgcaagggctgcaccaaatacacccaatccaagtcctgccaccatccaaagatccataataatattcaaaacagaagaaaatatcagcagccccaacggaatctttgattccccgattgaggtgaacatcgttgaaaggatattgtacataaataaaaacggaaatcccacaaaatatacccgcagatacagtaccgcttcctccagtatgtcagtgggtgtttgtaaaaggctcatcatcggatgcgaaaaatgaaagccgaatacaccaagaagtacgcttaagatcagaaagctgatcaaagatgtcgacacaatcgttttcattttgccgtaatctctggcaccaaaatagcggctcaccagtacgcctgcaccgacaccggcaccaagtgccacacaaataaacacattcgtaagtgccgcgcatgcaccgacagccgcaagtgcagacgaaccaacatactggccgacaataatggaatccgccatattataaacctgttggaaaaagctgcccagaatcataggcattgcaaaaacagtcaacgctttgagcggggcatctgtgatcaggtattcatcttttgacattatcttatttctcctaaattcctgcttttatctgggatttctgccacgatttattccagtgtcaatacatcggccggcatcaggcattctaaaatggcatggaatatcaatgcttactcttccgccagctcctcataaaaccggtaattgttcttgccattctgtttgacgtaatacaatgccttgtccgctcttatatagtattcttcaaagctttctccctgtctgcacatgcacagaccgcaggataaggatgccggtgaagtctccgtcgtggcattttttgccgcttcaaagctgtcaaacagctttctcatctgcgtgttcatctcaacttctgatacctcagacagatagaagaggaactcatctcctcccagccggcagaccaccgcattctccatgcacgctgtgagcattgctcctaccagcctgagagcatgatcccctgccttatgtccatagacatcattgatcttcttgagattatccatatccacaaatcccagacagccatcatgctcctgcattttttcaataatcagtgtctcacctttatgacgcatgggaagtcctgtcaggtaatccaggctttcccgggcctctttctgtcgtgccagctccagctcgcggatgcggtccattgtctggatcagggtaacgaccagcaggaccaccagtccgattgcaataaagattccggacagagacacaacacgatacacctctgtcacctccagcatgactgcgatcatggcagctaccagtccaatcagcggaagcttgtaatgtttcgctgttcccttgataagatcccggcagatggtgataaatatcgtcaggaacgttcctgcgatcactatgtgggacaagaacattgtcgaaataaaatctgcgatattcagtacctgtaagatcgtgcatatcacaaaattcacacaaatgatacactctgccacatgatagaccttccggtatcttccctgctgcacactatcaatatagaacatgatcggaatcgggcagatcatcacaacaaggaagcacatattcgacagaatggaagcattgggaacaaacagctgacgcagcttcgattctcccagcatccacactgctcccaggatcatgcaccagcccagatactccagatcaaatcttgtcttgtatacaatatcgagcaccagactgatgatcagcacgaccagtccggaaaacaacatagtgcaggcgatcagagttaccataaaatagcagtgaaacatataggtccagatatctgatttatccccgcaatataccgtgttgacgacaccggaatacttttcagtaaaagactgcagttcgatccgcacttcctgccccgcatcctcacctgatgtctcgcagaacacatacccgctggcagaatttttcccgaagggtctggtattcttcgtatcatacaccgtcctcagttcccctccgatataaatgcgcacattctccatagaggatctgatggcgatcgtattttcattatagtcctgtgggagcactgaccggatgaccataagctcaccggcaggtacatcataccggcccggaacccggatctcctcttctgtcatttttattacctatattaaataattccgtggcatttcccctgcttttatgacgatattggggtgcagtccaatatctttctcccgctcatgaacaagtttatcacagactgcaggaaaagtaactatctattttactctgtagacggagatatttcgccctgcttattcttgtagcagccaatcggctatatcgtgaatttcgactccttcatagctatattttggatgtttggttctggcaataatcattttcggataagcatctcggatctgaagcagaggagagcattctctctcaaatgtttcctgcccggaaatgttgtcgctgacctgaatataaatcttctcgctgcctctctgagcaacaaagtcgatctccttttgatagagcttgccgacatagacatcgtatccacggcgaagaagttcgatgcaaacgatgttttcatatactctgccgtaatccatatttctgcttcccagtattgcatatcgaataccgctgtcacacaaatagaacttttcagagctttcaaggtatttcttgcctcggatgtcgtatctcttaatatcataaaatacaaaagcattgcacaaatacttaatgtacttgccgacggttacatgattggtcggagtctcatttgctgtcagcagctgactgaccttattaggagaagtcaggttgctgatattatccataaggaactcgctcaaacgctgtaaaaccaaagtgtccgggagcgcatatttctgcaccaaatcccttgtaacaatcgtttcgtagacctctttgatatagtttgttctgtctttttcgattctgtaagcgtaagaacctgctaaaccgcccttgatagcgtaatcatcaaagagcttatctttatcattaacatcatcataatattggcaatattcttggaagctgaaaggaaacacatgaatttcaatatagcgtccggtaaacagagttgccagatccgcactcaacaggaaagcattggagccggttacatagatgtcgtattttcccttagagtacaggctgttgattgccaactcaaacttgggacacatctgaacctcgtctacaaacaggtagttcgttttaccttcctgataatgttcttccacataggcgtgtaaggcatggtattccttgatttcttcatacgccaaatccatgaagtcaatgaagatgatattgatattttcaaaatggcttttcagatactcaatatacgcctgcatcagcttggacttaccagatcgacgaatgcccgtgatgatcttgatgtcaggagtaccattcagttcaatgattctatcgagatattttgctcttgtaattgttttcatatcgtcacccgctttcaaaagtcaaaaatttttcatttcttgaaactgcttcgatgtacttattatactgtctgctaatagtatatgcaagagatcgctttcaaaaacacaaaatattttattttttgaaagtggagactatgtaaaggcaacctgaaggttgccccagacattaagcctatcctgtttacacaggttcattatcatcttcatcgacggagctatctgcatcatagtcctcaacctctggatcgtacccatagtcctcgtcatcgtccacataatcagcatccatccctgctgacaaaatcagtattttcaaccctgtttcactgacaaacctgtcactgaaattgcaattctgcacgaaaaaagcggcaatgaaactatcttcattaccgcttaaaatagagcgttccctataggaatcgaacctacaatagagtcttaggaggaccccaacctattgtcactctctgtcaatctgaggtaaggtaaacccaagtgggacactatataaaactgtttccgattcaatttgagttattctgaataccccctctgtcaagctctgtaaagctctgaaagttagctgattgtttgctccagctaataatcggggaatgccttgatattaccatcgacatctgttatatgaccaccatgcttcgtacgttcgatcatggtaaacagtattcaattaaactttcctatcgtaagtacaagatattttcttgtctataaataatataacgcatacgagacggtttgtccatgcgtttttgactagcaaatttataagctgctttcatatttttaaacacggacataaccagtagatggacctgcaccaacttttgcgatatacccactcttaaccagattcgtcaaagtcctttccacggtaattttgcttatatcaggacaaagctccatgatttctttctttgtaattttgccaaccttgttatcaataaccgctttaattctatcaggcttagaaagactccgatgcttcaaatgctctacacggctttcgaattcattgtatgctttcaacatgatacccagataatatttaacaaaaggctcatagctgttttctccctcatgccagccagtagagcttgcttgaagggcttcataatatgtttcttttgtcttttcaatcagcatttccatactgacatattttccaacgatgtatcccgccttataaaaaagcagtaaagtgagcaaacggctcatcctaccatttccgtcattgaaaggatggatgcacagaaagtccagaatgaacatgggaatcaaaaccagtttatcaatgcggtcagcttcccatgcttcaaggaagcgggcgcaaagttcttccatcgcttcagcagtctgaaatgcgggaactggaataaaacgtgccttctgatgaccctcggcatctgtttctgcaattacattatcggaattcttataacttccaccagcacccccctgtgaataggagtacagatctcgatgtaactgcaaaataatgttcggtcttgggttgatatattcatagccttcgtgaattgtggaaagtacttcacgataaccaacaatttcctgctcagatcggttgcggggttctgctttttgacttaccaattcttccaaacgcttatcgcttgtaaatataccttcgattcggttggatgctcccgtactctgaatcaatgcaacttctaaaagtgttttcaattcatctacattggcttcgagaaataattcctgtttgcctttatgttcatggatgctgctaaccatctgaacaatttcaggtgttaacaacttcgcaggacttacaataaaatcaaagtctctcatataaatctccttcatttcagatttatctccatcattctatcatcaaatgatggagatctcaatagatttgatggagatagaatatccatatacacaataaatatcctcatttcatccatatattatatcgttttatggattgttttttcattaaaattacactattttttcactatttttcattacttcatcgttttcgccaacgaattgagcaacgcccgcctctctggattcagattctttttctcataaaatgcttctttaaaaagctctgcatttttcctttggtcatcatccgaaatatgagagtacgcatccgtaaccatattgacctgtgcatggccggaatcaccctgtactgctttgatatcagataatggtacacacaagcacggaaaacactttatgcaaaatcttccacaataaaatctataaatgatccgcaaaggcaaaggaaaccgacagtttaccatgtttggaattatggcagttcttttaggaagtggagatgcattccatctggttccccgtgcagtagcgctttgtacaactggacttgagaactttactgtacagatggggttaggaaagtggattacctctatcactatgactatcctaaaatcatcccctcctcagaatttgcaacaagttgttgcaaattttctatatccttttattttacagaagtacttatttttaacttttttccttcagatttttatattgcaaaaatcatatcaccatctgcagtatatcctctatatgttctgcataataatcagccccattcagttcccctttctcaccatatccatacaggcatcctataaaagggcttttgcaggacctggcacattccagatcctgtctcctgtctccgactaccagataagggccactatattcccggatgatttcctgcacaatttctgtctttggacggaatctgtatgattcacagtcataaaaacggtcaaaccatcgttccatcccaaattccttccagtgtgcctcacgatatgaagctttacagttacttaagatcacaaggtgatatccccggttcttcaaagctgttagcatctcctctgctcccggataccacactgccttatgtttcctgatctgtcttatcatcagatctcctaccatcgtgcttgcctgctctttatagctctgatccagttccggcaaaaatgtattccacatctccttactgttaagtcccagccagccggcaatttccaccgagcctatctcccgttcttcggtaaccttctgttctgtcagccactgataggtttcacgaaatgccggttcatagattccaagggtatgatggatcgttccatcataatcgaatatgattgtttttgtcatcatttattttcctgtcttttagagctgcttcatcagattgaccatctcaatcgcagataatgcacaatcatagcctttatttcccgctttgcttcctgcacgcgcaatagcctgctcgatattttcagtcgtgatcactccgaataaaaccgggattcctgttgcaagttcaacctgtgcgattcccttggcagattcattacacaccagatcataatgtgaagtatctccacggatgacagctccaacgcagataattgcatcatattttcctgactgtgccatcttctgtgctgtaatcggaatctcaaatgctcccggtacccatgctgcagtaatgttctcttcttctactccatgtcttaccagtccgtcgactgcccctcccaataatttattcacaataatttcattgaatctcgctgccacgataccaaccttcattccctccggtgctactacttttccttctactaaattgatctgtctcattttttcttcctcctgatatttgctgttttttataaatttatttctttaaaaatatgacccatcttttcctgcttcgtcttcatatacttccggtcatacttttgtgccggaatctccagaggtactctctcattgatcttcagtccgaattcgccaagtccatagactttatccggattatttgtcagtaatcttaatgatttcacaccaaggtctgacagtatctgtgccccgacccagtactctctgagatccggtgcaaaccctaacttcacattagcctccacagtatcgtatccctgctcctgaagcgcatatgctttgatcttattgatcagtccgattcctcggccttcttgtctcatatacagaatgattcctcggccttctgcttctacctggcgcatcgctgtctgcagctgcaggccacagtcacatctgagcgatccgaatgcatcccctgtcagacactccgaatgtacccggcaaagcacatcctcaccatctcccagatcaccttttaccagtgccagatgatgctctcctgtaatatcattgatataaccatacattttaaaatcaccgtactgcgttgggaggtttgcaacggcttccttctttacatgcttttcatgtattcttatataatcctgcagatcacggatcgtaataaatgtaaggttatgctcttttgccatttcccatagctgtgatgtacgcatcatagttccatcttctttcataacttcacagcacacgccgcattctttcagtccagcaagtctcataagatctgttgttgcctctgtatggccatttcgtaccaaaaccccgccttttctggaaataagcggaaacacatgtcccggtcttctgaaatcctccggttttgactgatcatccacacacttcatgatagtataggagcgctcttccgcagagatacctgtggttgtatctgcgtgatctactgccacggtaaatgctgtactgtgattgtccgtgttctccgcaaccatcggcggaaagttcaatctcgccgcaatttctgcactcatcggtgtacagataagaccctttgcataggtcgccatgaaattaatattttccctggtcgcaaactctgccgcacatatcagatctccctcattttctctgtccggatcatctgtgaccagaactatttttccttccttaagatccctaagtgcttcttcaattgtgttgtactgataattttgtgacatagtgtatatcctcctgttctaaaacccgaattcttcaagaaactccatcgtaattccggattcttttttctcttcttcgttttttctgatgccaagcagtttttctacgtattttccgatcacatcattttccagattaaccagatcccccggcaccttttccaaaagagtggtttcttctcctgtatgtggaatgaccgacacctgaaaaccagcttcatcaacccttgcaactgtcaggctgatcccatcaatacagacggatcctttttccacgatcagatgcaaaatctgtggcgatgtctcgattgatacccagatggcattttcttcctggagcatggaacgtatcacgccagtcccatcaatatggccgcttactatgtgtcccccgaacctgccgtctgcagccattgcacgttccaggtttacctggcttccggccttgcagctgccaagactgcttcttctgatcgtctctgccatcacatcggcagtaaatccgtccggctgaatcgacgtaactgtcagacacacaccattcacagcgatactgtcaccgatccttgtcccttccaggactttccgggctttcactgccaggatccctgattcccctgtcagctgtatataacggacttttcctttctcttctacgattcctgtaaacatgattcctcctgttttttatcacacacctgacattttatccggatatcctcaccgatctggcagatatctgtatatttcagttccactgcttcagacggcagttcaactccaataccctctaccggtgtcttcccagccacaccgccaaacagctttggtgccacaaaagcctgtacttcctttacaattccagctcgcagtgcactgtcatttaacgtacctcctccctccaggaggatgctgtcaatgcctctgtttccaagatctgccatcagcttcttaaggtctatctgattcttttcgtcgggacagtaaatggtttcaactcccatggtatgtaatatttttattttctcttctgcatttttctgttctgcataagccacgatcgtccggtacttttccgcactttttacaatctgactgcccggcgggatcctgagcttactgtcacacacaatcctgacaggacttttccagccttctacccggacgtttaacatcggatcatctgcaagcacagttccaataccagccatgattcccatgtactgatgccgcatatgctgtacttcttttcgtgcagattctccggtgatccattttgatgctcctgttttcgttgcgatcttcccatccagtgtcatggcatacttcattaccacataaggagtcttcgtagtaatataatggaaaaacaccgggttcagctgatcacattcttctctcataaaatcttcaactactgttacaccggcttcccttaacatctgtacaccttttcctgccactttcggattcggatctctggaaccgatcaccacttttctgatcttctgttcaatgatcgcttccgtacatggaggtgttttaccatgatgacagcaaggctccaacgtgacataaatcaccgcaccttctgctgattctgtaagagaagcaattgcattacgttccgcgtgaagttctccatactttttatgatagccttccccgatgatctttccgtcttttacgatcactgcccctaccataggattgggattcgtccagccttctccttttttggccagttgaatagcccgaagcatatattcctgatccgtcatttctattccttctttcttattcctgttctttgcctgggctacgccgaggcttttaaacatgtgcaatcggattcacagacaagtgaatggtatagttatttcgaaaacgatgtaccagatacaaaaaaagcctgcagaaatatctgcagggtggaattgatctgttacatatgattgataaatgaatgtctgattttcctatataaaaagctctgaaatggatcaccatctcagagctctgatactacattcattcatacaaaaaatcaactgtactatcatcttcttccatccagactgtactgtcggccccggaatctcaccggatcatgcctctcggctcgcgggctttaccgccggtagggaatctcaccctgccctgaagatatctttttgtttattttaatactttatctgttatttgtaaagcagaatttttattttacttagtttactggtttggaaatgaaagttcccggatgagcaattttcatataatttctcagttccaatgccaatactcttaaccgttcaatcgctatctcaacgattttttcatctggatccatctgatccactttttctgccataggcatcctccttcttcctgaaacaaaaaaatccgcccagattagaacctaatctaatctgaacggaatactcattcaggcttgatattttccaagcagaaatagttttaatcattacccttttgttagctacaagaatttacaaccttttacaccagttgcattatagcttttcattcctgttagcagaaatgctcattttttgatttgctgttagcagaaaaacaataaaaaaaacggcaatgatttttctctcattaccgcttaaaatagagcgttccctataggaatcgaacctacaatagagtcttaggaggaccccgttatatccatttaactaagggaacaaatgccgtattttcgggcttttcagcctttttggctccggctgcaatgtttatgaatccaatcacttgcgtgatgaattgcctctgttattatatattgattttagtctttttgcaaactctaaaatccagttgtgtctcactaaatggtctgcacttagttgccccttaggagggggctgttatatccatttaactaaggaaacatatatttgctgtatacagacttttctgtatacagcttatttattttaccatattatccgataaaaaaccatagtaaaatgacaaactaatcccggtattttacgctgccctgcatccagatatttcccttaaaacgtctgcccacttccggttcgccgagcagatctttttgattgatacagacgctgaaaagaatatcattgcacatgatttccatggaatatacattttcctccgtgaagcggttctggagcagtgtcacatccatgatctcgccgagcaccgaatactgatcgctctcgataccgtacggcataaagtaggtatccacaatgctaagcacatcttcatgtgtgatcctttttgacaacagcgagtaggtatcaatgtcctccagcgtcagattctcgatcgcatcctcatccccgtctcttgccgcggcaatcagatgattccggtctgttccctcctttggcgcatgaggcacttttttctccgccttattgatcgggaataaaatctttccctccgtagacagcgcagctaaaatgacgccgtctgccagattcatatatcctttgctcttgctgaccgcaagataatccaccacattctgaagataaaaaatgagtgtcactccaatgcggacttcatcacatatccccgcataggattctttttccgcatgtttttccacttctgcgggttctattgtggatatgttctttccacacaaatacggatagtaatattccatctcaaaggtatcatcttcgttatacacgcctcggacagagattccgaaaaaatctccgtattcctttgacagttctgcaaattcattgccctccgaatcaagtgcagccttctgaaccgtcggtgcgcttataatatctgcaaaaatatgctgcagctgttcttttgtaatatgactgaacccgatggctcttagaaatttgtgcattttctatcctcacctctttctgtttctagttttcgacctgaagaatagatacattcttgttcttatttaactgatataccttttccgtcaaccggttctcttcatccaaaattctaattacaggacggatggaattttctgtctgttttaaaacgattcccgattcgcctgtattaagccgaaccctcgtcccaaccggataacgtgcgacgagccgctcgatcgcacgcacgattctcctgtcataaaaaatatccgtaccttccaccagatactcgagtgcctgctggatgctcatacgtctgcattccatcccgctgataaaacagtcaaatgcatcacatgcctgtaatattccacattccgtatcccgtgttttctgcttcagaggaaatccggagccgtctcttctctcatgatgtacaagtaccattttttttacaaaaggatccatccatttttcttcctccagaacagagtacgcaaggatcggatgcttccggtattcaaaagcctctgcttctgacaattcgttgatgtcgcagttgatatacggcaccgtaatgtagcggagtcccagatcatgcagcaatgctcccagtgcaagtctgtaaatctgctccgcagtgagcttcattttttttgcgactataatacataattttgttactacaagtgtatgttcgtacaaattaccttcgcgttccaaaagatcaattaccatattttcatccgcctgcatgacatcctgaataatgtcctctgcgacgtattcaatttcccgaagggaactgcccctgtgataaatatgcttttccagaatagattttattttttcaatatattcttcccgtttttcgttactgataatatcatgtggtatttcatcttcctcatagggatcttcgatacacacggtctcgattcccagaaaggagatcagatccagatattccgttttcagcgttgttccctcagaaatgagaatttcattttccttcgttatgaccggccctgcaagtttctcccccccttgcagtgttcttaccagttgtattctcatacattatcctcattcgttgttttctgtttttcccatagctctgtcgagagctttctgctcctcatccgataacacgataatggaattaccatctacgatctctttgatatatgtatagcagccttcgcgtgtgtgcatggcattgatgataaatccgttatttcttacatccagcatggcaagagaaaaactgagttttcctcccatctcgttgaacgcatcatactttatcagtcccatcttctgataggtcagctgcatggcctcaaacaatgatttgattgttttttcattctcattgtttgcctcaagaagtgtatctacctgatccagacgcttgatcagggtatcctccagattcttaccgttttttccgctcataaatactttgtatgcttttttcagcttccgcatctgcgcaatatttacaatgataagaatcaatagaatcagaaccactgcgctaagtccgataataatataatcggaatcaaaacctaaatactgtgaaatcatatgcttcctctctctttattctgatatggcttttatcagaatcttactctgtctattttcggatggatccaaacagatccatgatacggtcaagttcatccatagaataatattcaatttcgatcctgcccttctggttatccttctgattgatggcgaccttcgttccaagaatgactttcatcttctcttccagatcacggcagattgcttccatcttcggatcgatttttacctcttcctttgcttccggctgatctttttcctgctggatcttctttaccagtttttccgtctcacgcacactcagtttttcgtcgaaaattttctgtgctgtcgtatactgtttttcctgatcgtcaataccgagaagtgctctcgcatgtccggtcgagatcatgtcatcaattaccatctgctgtactctctcgtcgagttttaacagtcgcatggaattggtgacagcggttctgctcttcgatacacgctcggcaacttcatcctgtttcagattgaactctgtcagtaaccgcttgtatgcgattgcttcctcaatcggatttaagttttctctctggatattttcaatcagggagatttctacgacttcctggttggaaagattcttgataattactggaacctcttttaatccggcaagtttcgctgctcgccatctgcgctcgccggcaataatttcataatatccttttctgtcctgtacaagcagaggctgtaacacaccaaactgtttgattgactcggacaattccaacaaggcatcctcatcaaaattctttcttggctgttcccggttcggttctaccttattgatatttaccagaacaccctcgatgactttatcatttttcacattttcattctttgcttccgtttttgtggcacttactttgtttggaattaaagaatcaattccctttcccagtccacctttttttgcagcagccatagctctcctccttatctctccatcacttcttttgccaacatacgataactttctgttcccgctgattttgaatcatacatattgatcggaagtccgtgagatggagcctctgctaatcggatatttctcggaatcagtgtctcatagatcttggtatcaagattttcttttacattctctactacctggttggacagattggttcgcacatcatacatcgtgaagacaactccgtcgatgatgagattcggattcaatctctgctgtaccagatcaatcgtgtggatcagctggctcaatccctcaagtgcgtaatactcacactgaattggaaccagcaccgaatccgcggttgtcatcgcattgatcgtcagcatatttaaggacggcggacagtcaatgataataaaatcataatcatccctgatataatctacggcattttttaaaatatattccttttcattgataccaagtaactcgatctctgctccggcaagattcacattggacgggataatcttcattccttctactacggtatctgccatactctctttaatggaacactcatccagcatcaattcatatacagtattttccagttcgtttttatcaacgcctaatccgcttgtcatatttccctgcgggtcaagatcaatggtcaacactttctttcctgcttctgcaagacaggatgataaattaatagctgtggttgtcttaccaacaccacctttttggtttgcaattgcaattattctgctcatatagtacctcttttaaatttttattaccctgttcatttggtgcgttttgtttgccagagttcattattttagcaaacttctaatatgaactcgccagagttcattatttcttctgtttgcgcttctttttgcgcatccgaagtttcattgaaacttctaatatgaactcgacagagttcattataacacttttacatattcttttctataggaaagttcgtatgaaatgtttcacgtgaaacattttcacgctgattgcaaactgttgtatttctgtttttttataaatacaaaatcttgtagaaaacatgtgtgaaacattttatttttataatgtttcacgtgaaacattgcgatgatttttccaataatacgcgttttaaaacaatttcatatagtaataaacattatttcttctataaaataattgagtgtatcggatgattccgaaacactcaatctttatactctctaatactaatgaatagaaatcaaattatttcgaatagcaaataccgctgcctgcgtacgatcagaaacatcaatctttttaaagatactcgatacatgatttttcacagtacgttcgctgatgtgcaattcatcagccactcccttattgtacattccaactgcaagaagcttcaacacttcaagttctctcttcgtcagtttttcaatcttctcgctgtccatatcccggtcaatcatttttgcatttaatacaggaatcagactcggctgtatgtaatcttctccatcgacaacagataagattgcttttttcaattcagaagactcggagtctttcaacagataaccattgattccgatgtccactgctttcaataaatactctacttcattatgtacggtaagaacaagaatcttgacatctattttttcatctttaatcttctgcaaaacttcaagtccattcatgcgcggcatattgatatccagcaacaaaacatccggtatctgctcttttaatttttccatgcaatcaataccatcacacgcctctgcaattacctgaaagtctccttccagttccaacagctgctttaatccttcacgaatcaatgaatgatcatctgtaatcattacttttactgccatttaaaactcctccttgttactaataggtactttcactataatttttgttccaacaccgatcttagagtcaatctgtatcgaaccggataataaatatactcgttctttcatcatagacattccaaacccagaattatcatcccttggacgctcatccagaatatgaacatcaaatcctgttccatcatcctcgactattaccgtgatagccccttgctcgtatcttaacagaacatgtatcagagtcgggtttgcatgacagatcgcattgctgcatgcctcctgaataattctaagtaacgttatcccgataatcggttttaattgataaggagttccttccactacaaaatgaatcttcttcgtgccggttgcttccagcttgtccaaagttctctcaattgtaatatccagaccaatatcatcaaaagacatagggcgcaggttataaatcatctttctcgtatcatcgatgatctccctgagattcttgatcatcttactgagttccagcttacaccggatcggatccatatccaccagtttactgcacagttctgccatgtgaaccattgccgtaagattctgaacggtactgtcatgaagttcgcgtgaaatgcgttgtctctcattctcctgcgtttcaaggagagacgtatggtacctttcttcctcaagtgtatttctgtcacacctgcatgcaacatctgctttcgcctgccgcaataccttcgccgcttcttccactctttccatctgctgcgtatggtagtctgtctcctgctgaattgcttcctcgagttctttcatctctgcatgcaattcatcgattttctgcttattcctggaatttacttttcttggagtaaacgactcataattaggatcattcgtctcctcaagcaaatggatcattgcctgcgtctctttcaaatgaatctgtaaatcagaaatccgcttcgcactgttctgctcctcttttaaaagttcctcataaattttctgaatatattcttctaccatttcgccaccgaacatatgtttgatattaaaaaccaaattaccagtattattttataccaaacgtaattcaatgaaaagcaaaaatttatattttcagaatttttaatttgtataagttatggaaagcggctataatataagtaataggaaacgttttgcaaagattacgggaggttctatgaacaatagcatgaaaaagaatatcagacatttctttctgctgactgctcttgctgcaggcacgattcatcttgtgaaccgcttcatcgatatgacagcagagatgaaaaacattttaaagacggaaagcggcagctactatcactggaagaacggcagcattttttatatcaagcgcggctccggttctccgctccttctcattcacgaattaaatccgattgcttcttcttatgaatggtgcagacttgtgaaaaagcttgagaatcactatacggtatataccatagacctgttgggatgcggccgctcggacaagccttatctgacttataccaattacctgtatgtacagcttctcacagattttattcatgatgtgatcggggaacgcccggatgtggtaacgacaggcaattccatttcgtttgcggtacttgcccagaatatgaatccgaatcttctcgcaagcatcactgcgatcaatccgcctgcgatgagcagctttgactgcacaccggacaagtattcctctgtcaaaaagacactgctggagctgccgatcctcggaacattcctctacaatgtccggacacacgaatccaatatccagcggacactgcagaaaacatattttagcagaccgcagcttgtatccagcaagatgcttgatgcctactatgaggcatcgcacatgggaaagagccacggaaaatatctgatggcaagcatcgagggacattacaccgacaatgcaatcggacatgccgtgaaaaagcttaccattccgctatatattattgaaagccgttccatgacagatgcggttgccattgcagattcttatgcgcacaagaatgcaactgtagaaaccgcctatatttcaaatgcaggtctaaccccgcagcttgaagtaccggataagcttctgaacatcatgcggatgttcttacatgaagatcactaatgtaacgtcataccttatacaatcaaatacttcataaaatcaaaagagagatgacacgaccggatcaaggatccatcgcatcatctctcttttctgttactgcagcggttcttttgtcggtgtgccggcttttcttggataagctttcggcgtcttccgctctttctcaatcacaacaaacgaacgcttctgatcaaacagatcaaatttgtaaatatccttcacttcaccaccaagaagataaatggctctctttgcctgtgcggcttcctcatccacctcccctgatttataggaaataaatgctcctcccatcttcacaaacggaagacaatactcgctgagagaggataaatttgccacggcacgggacacgcataggtcaaactgttcccgatataatgtatttctgcccatctcctctgctcttccatgaacagcggtcacatcttccaatccgagtgtgtcaatgacctcctgtaagaaacggattctcttattcagtgaatccgccagcacgatctgaagtttcggaaaagcaatctttaaaggaattcccggaaatcccgctcccgttccaagatccagaatccgatatgcctccggtcgatcttcgagacttcttaaatccttcacacgacacagggaaaggctgtcaagaaaatgcttctcaattacttcgtcaaactctgtgatagcggtcaggttcataactttattcgtttctaccagaagttcataataggttagaaattgtctcatctgtttttcgtccagatggatctgcaaatcatccagaccttttttgaacttttcaagattatacgccataaaccacctctccattcctgcgctctttttctttttatgaatgatactcctatgaatgatgctccccatgatgattcatctgttccatgtacaccagcaataccgaaacatccgccggcgatacaccggagatacgcgacgcctgaccgattgacgtcggactgtacagctttaacttctgccgcgcctcaatgcgcagactcggaacctcattataatcgaatccttccggtatctttttcttctccagcttcttaaagctttccacctgcttgatctgtctggaaatatacccatcatacttaatcagaatattaacctgctctctcacttcttccggaagttccgatctctcatgatcgatcggcgccagcttatcataatcaagctccggtctgcgcatcagctccgttaacgtcacaccggtatttaacggtatgctcccgtaactctccagaagagcctgcacttctttgttcgcacctacatgaaccttcgcaacacggtcaatctcctctttgatcatctgctcttttttacagacccagtcgtaccgctcttttgagatcagaccgatctcatatccctttttcgtgagacgcagatccgcattatcctggcgaagcaacagacggtattctgcacgcgacgtcatcatacgatatggttcatgattctccttcgtcaccagatcatcaatcagaactccgatataagcctccgaccggtccagcaccagcggctctcttccgagaatctccatcgccgcattgataccggcaatgagtccctgacaggctgcctcctcataaccgctgctgccgttgaactgccctccggaaaaaagtccccggatcttcttgaattcaagagaggcatacagctggtttggattgatacaatcatattcgatcgcataggcattccggacaattttcacatgttccagtcccggcagagtgcggtacatctcatgctgcacatcctccggaagtgatgaggacattcctccgacatacatctcattcgtgtgaagtccttccggctcaatgaaaatctgatgcctgtccttatccgcaaacttaaccaccttatcctcaatggatggacagtaacgcggcccggttccctctatgattcccgcatagatcggagaccggtccagattgttgcggataatctcatgcgttttctcattcgtgtaagtcagccagcaggacacctggtcgatctgcacatctttgggatttgtcgtgaaagaaaacggaacaactttttcgtcacccttctgctcttccatcttggaaaaatcaatcgaccgtttgtcaattcttgccggtgtaccggtcttgaagcggaacatttctactccatgtgccagtaatgagtcggtcagatgatttgcagccatcaaaccgttcggtccggtataggtaatcatctcgccggtcagacaacgtgcgcgaagatacgttcccgtacacaacacaaccgccttacagtgatacgttgcacccgaaaccgtcttcacaccggtaatctgctcacgatcgccctcttttgtgagaatctcggcaacctccgcctgacggatcgtcagatgctccgtattctgtaatgtattccgcatctccatgctgtaatttgccttatccgcctgtgcccgcagcgaatgaaccgctggtcccttggatttgttcagcatttttgactgaataaatgtcttatcaatattgattcccatctggccgccaagcgcatcgatctcacgaaccagatgccccttggaacttccgccgatattcggattacacggcatcaaggcgatactgtccacactcaccgtaaaaataattgtctcaagccccagtctcgcacaggcaagcgccgcctcacatcctgcatgtcctgctcccacaactgccacatcatacgtttcttccaaaagattcttagaattcataatcaatacaagccctgctctctctgattgctgtaataaacttaccaaactccacatgcatcggatgcttctgatatgcattcagatcatccatattcttaaaatcaaaaataagtgaaagatcataattgctgtccggagcagcagccgcattcgtcacaacctcaaacgttgcaatcaggggaatctctctcatctcctccaaacggcgcagtgcctccttcaaatttgcttccttattctcatccttcagcttaaacatacagatatgtcgaatcatcgctgcttcctccttatcttatggttgcatacttccaataatagctgtccaatggtttcttaaatatttaggccaactattttcccagacaaaacttactgaatatctcattgaccagatcatcttccaccgcttccccgatgatggttcccagcacctcatacgcgttcatcagatcaatcgagtaaaagtcctccggcattccatccgcgatactctgctctactaaatgtaaactagaaagcgcctcctgtaaagcggttttatgacgaatgttcgtaatatagacttcatcattaaaggtaacttctccccggaaaaacatttcccggatctgctcggtaaagacatcgattcccttctgctctctcgccgaaatagaaataaccggacagtctttatccacatgtacacgaatatcctccgctgttgtcaacggcgttaagtccgatttgttcaaaagtacgatcgtgcgtcttccatgaagcagctccatgatctccccgtcgttctcatccagattcgtggaggcatccactacatacagaatcagatctgcatccttcacatattttcgtgccttgtcgactccgattttttccacaatgtcatccgtatcacgaatccctgcagtgtctatgatattgagtatgattccattcaggttaatctgctcttcaagcacatcccttgtagtaccggcaatttctgtaacgattgcccgctcctcgcccaatagagtgttaagaagtgacgattttccggcatttggttttcccacaatgacggtagaaattccctcttttaagatgcggccgttatcactggaagccaacagcttctcaattctgtccactgcaccctctatggtaagctccagtctctccccgtaaccatccaggctaatatgctccggatcatcaagcgccgattcaataaatgcgatctcgtggagaatctctccccgaatctctttgactgcatctgagacagcgccggacaactgcttcatggaactctttaaggcaaattcatttttcgccgaaatcacatcaatcacagattccgcctgggacagatcaatacgtccgttcaaaaatgcacgcttagtgaattctcccggctctgcgggtctcgctccatatttgataactgtctccaaaatgcgcttcatcacataaacaccgccgtgacagtcaatctcaaccgtatcttccctggtgtagctccgcggtccgcgcatcagtaaaaccattacctcatcaatgacttcctctccatcacggatgtgtccgtaatgaatcgtgtgtgtctccatatccgaaagcttcttaccgcccggcatatgaaaaatctgatctgtaatggaaaccgcttcttccccgctgattctgacaattccgattcccgatcctgccatggcagtcgcaatcgcagcaatagtatctgttttcataaatctcctttaatgaaagaatggggatgtcagacgacacccccactttgtactctatttcttcagggtaacaaccacatgtctgtaaggctcctcaccttcactgtgcgttgtcacaaacttatcattctgtaaagtcgaatgaataactcttctctcaaacggattcatcggctctaaagaaaccgggcgcttcgttctcttcaccttgtaagcaatgttcttagcaagattctcaagcgtctctcttcttctcttccggtaatcctccgtatcgatcttgaccttcacatactcttcggaattcttattcactgcaaggttggtcaggtactgaagagcatccagcgtctgtcctctcttaccaatcagaacacccatatcgtctccctttaagtcaacgttcacgacattgctgtcctcttccttctcaatctggatcgtgacggtaagtcccattgccttaaatacgctctcaaggaaatcacggatattatcattcgtatcgttcttcctgcgggcgcggatcacagcgtcctttctgttgattccaaggaaacctgcgcttcccttttcgattacttcatattcgatcttgtcatgggttgtccccagcttgatgatggcttctgtgattgcgtcatcaactgtctttgctgaaatctcaatataatccattttcatcaccataccctttctaacttactccaccccgaaacttactttctgttgttacgctcgttaaaatcacgtaccatatttgctttcgcgctcatgcttccggcttttgccttcgactttgctgcgttcgccttctcgatttcaagctctttctccgcactgctcaactgcttcttattggcgtctaccatctgtctggtattcatttttgcggcattggaaatctgattctcggcgattcccatcttctcacgctttttcttcgccttttcctgattcttttttataatatcttcaagattcatcttctcgaaatgcttgttcaggaaatactgctgtacaacacggacaacagcaccggcaatccagtagataccgagaccgaccggaacggtaaaacacataaccagtgagaataacggcatcatgcggttcatcatcttcatctgctgtgccatcgcatcgctctggtcattgccacttgcagtcgcctgcggcattaacttgatgttcaatacctgtgtcaggtaagaaataatcggaaccagcaaggctgcaatgaccataaggtaagcacctgcagaaaaacttgatgtaatcacatgaagcggtgtatctgaaatattcattccaaagaaattatttacatgggacaccgtctcataggtggatgaaatctcactggagagagccgggaatgcatcctttaacgcatcccatccgctggagttcatcttataagtaacatccacgatcgagttggcaatcgcggtcggatccgaaacagtaaaattagctaccggctgtgtcgtgatcttaagtgtagacaccagattggtcatggtatcctgatatccctctgtcgccatgatgccgtctaccagggatgttgcattgccgccaagcggctgtgtgaacagattcttaataccgcttacataggcaggaacgttcatgaatacacgatacaaagcaaacagaagcggcatctgaatcagcatctgcacgcagcttcccatcatggaaacaccgtacttctcatagacagcctgtgtctcctgctgcattgccatcatggatgcctgatccttttttccctgatactttttattaatcgcattcagctccggctgcatcttctgtgacagctttgagaacttctgctgcttataagtaagcgggaacagaagaagataaataataatcgtaaatataatgatggaaagacctacattaccaattccaatctgatccatcagatagtagactccattcattacccatccaagtaattttgcgattggtccgagaatcgcaccgtcatacgctgttaataacatttctgacacttaaaatacctccactatggaaccggatcatatccaccttttgaaaaaggattgcatcttataattctccataaagccagcgtgccgcccttgatggctccgtatttttcgacagcttccagcccgtacaacgaacaggttggacaatacggacacttggtcgttttcatcggagaaagatattttctataaaattttatcaaagcgatcaaaatttttttcaaaatgattccatcttcttttctttactaatgatcttgtgaagacccccaagatgcagcagcgcactctccacttcatgatacgagatgtccttcgctgtgctccttgcgacgactacaatgtccaaaccactattgaacatgtcttcatgcagtctgtagctttcccggatcagccgggtcagatgatgtctgataacactgtttccaacttttttactcacggaaatccctaaacgatttccttctgtctgatttgaaagaacgtacatcacaaggtaccggttcgcatatgactttcccctgcggtatacgttctggaaatctttggttttcttcaatgactcggaatatttcattctgtatgcatgtcctttatagaagaaaagaccacataagatgtggcctaagctgacaatttctttctaccttttaatcttcttgcagccaatacttttcttccgcctgctgtgctcattctgcttctgaaaccgtgaactttcgctctctgtctcttttttggttggaatgtcatcttcatatcgcattcacctcctctacgttacaaaacatcattctcaattatatcagaaaaagtctccaagtcaagcataaaataataatcccggccatcagaattcatctacatttccacaatctgctctttgtggaaaaaaataaccactgtatatataaggaagaaactcatgccatctatatcttgtaaaattgctttccacaaccattccacaaaaaaaagtaaaattcagggtcccggaaagcccttaaatacgccgttgacataagttatccccgaaatgtggataacttgtggataaaacatggataatacacggacaagttgtgaataagcatcacaaacgctgatttttggcggtctataacatgacatcactttttttccctcataggcaccgtattttgcccaaatagcgatttttttcttttacagtgttcccctacgccatagcgctccaaagcaaattaaacattgattaaagcactaaaatggtgtaggatagaaggtgtaggattttttttagtatgataagaaattggagcgtttacatggatcagattttagaaaaatgggacgagatcctgatgaccgtgaagacagaacacgacatcagcgacattgcttttaacacattcttacgtccccttgaattttatggtgtcactgggaacaccgcatatatccttgtcccgtccgagcagttgggactcagctatatttccaaaaagtactatctgccgctcaaagtagcaatcacagagatcaccggaacagaatacgagataaagttcattcttccggaacaggcgaagtcgatcgcttcttctcctaataaacagaaaaagcctttttactcagaagcggcatccaaatcgaatctgaattccaattatacgtttgatacattcgttgtcggaagcaataatcgttttgcccactccgcttctctcgcagttgcggaatctccgggcgaggcatacaatcctctctatatttatggaggaccgggactcggcaagacgcacctgatgcattccatcggtcatttcatcctggagcgcaatccggatgcgaagattatctgcgtgacttccgaagaatttaccaacgaggtcatcgagtccatccgaagcggtaatgcagccgcgatgaacaagtttcgtgaaaaataccgcaccatcgatgttctgatgatcgatgatgtacagtttattataggtaaggaaagtacgcaggaagaatttttccatacgttcaatgccctccactccgccggcaagcagattattcttacatccgataagccgccaaaagagatggagacactggaagaacgtatccgttcccgtttcgagtggggtctgatggctgacatcggaacaccggactacgagacgcgaatggcgattctccgcaagaagatcgaagcggatgaaatgaacttaagcgacgagatccttaattacatcgcaaccaacatcaagtccaacatccgtgagttagagggtgcgctcaacaaacttctcgcctactccaaccttgagaaaactgagatcacgatggagattgcccagaaggagcttcagaatatcatcactccggacaagccgaaggagattacgcctcagcttatcatcgaggtcgtatcggagcatttccagatctccttagatcagatgatctccaagaaccggagcaaagacatcgcaaggccgcgccagattgccatgtatttatgtaagaatatgaccgacacaccgttagattccatcggtgcgctgctcggcggcagagatcactctaccatcatccacggcgtccagaagatttcggatgagtacgagtcggacgagacgacacgcagtctcatcgacaccatcaagaaaaagatcaacccgaactagatattcacattcggttgttgaaatattgtgtaaggtttgttcatgaaactggataaacatcattatgtaaaccacttaagacttctttcacatttttctttcaagtttacataattttttattcacaggttgtccagatttcatccgcacgtaattcacagactttcacccttcattttttacctgaaagtcttatagatcaagggctgtgtgacttattcacatataaacaccccctaagaatattactttgaatctctttttataacaatcatgtatggcgtgcgcaccatatattccacgaaccacaggaaggagttattaacaactatgaaactgatctgttccaaatcaaatttattacacggtgtcaatatcgtatcgaaagcggttccaaccagaaccacgatggccattctggagtgtatcctgattgatgcttcagccaatgagatcaaattaactgcaaatgatatggaattgggaatcgagacgaagatcgaaggcgagatcgcagaacgcggagtgattgctctggatgccaagatattttccgagatcgtgagaaagcttcctgacagtgatgttgtgattgagacagacgcttcctttaagacgaccattacctgtgaaaaagcaaagttcaatatcgtaggaaaatccggagatgatttttcctatattccttatatcgagagaaatgaagccatcacgttatcgcagttcaccttaaaagaagtcattcgccagacgatcttctcgatcgcggacaacgacaataacaagttaatgacgggagagctttttgagatcgaggagaatcatttgaaagtggtatctctcgacggccaccgtatttccatccgcaacatcgagttaaagaataactatgagcacaagaaggttgtcgttcctggaaagacgctgcaggaagtgagtaagattcttccgggaagcgcggaggaagatgtcaatatgttcctgaccgacaatcacattgtatttgagttcgacgatacaactgtcgtttccagactgatcgagggtgaatactttaagatcgagcagatgctttcctccgattacgagacaaaggtcaagatcaacaagcgcgagctgttagactgtatcgaccgtgcgacgctcctcgtcaaagagggtgacaaaaagccgatcatcatgaatgtgacagacggaaacatggagttaaagatcaattccttcatcggttccatgaatgaggatattgatattgtaaaagagggcaaggatattttaatcggattcaacccgaagttcttcatcgatgcgcttcgcgtaattgatgaggaggaggtaagcctttacatggtgaatccaaaggcaccgtgttttatcaaggatgatgaaggaaagttcatttatctgatactgccggtgaactttaatgccagcaccgtttagaaacgaggcgtaggagagatatgatagaaatagagattcgcaaagaggatgaattcatcaaactgggacaggcactgaaaaaagccggacttgtggagtccggagtggatgccaagttcgtgatccaggatggacttgtaactgtgaacggggaagtagagacccagagaggaaagaagctgcacggcggtgaacttgtttcctataatggcgagacagtaaagatagtcagatgaacattcggtcaatcgagcttaagaatttcagaaattacgaaaatttagagatttcttttgatgaaggaaccaatattttattcggggataatgcgcagggcaagacaaatatcttagaagcggcatatatgagcggaacgaccaagtcccacaaaggaagccgtgacagggagatgatccgtttcggtgaggaagaagctcatctgaaaacggttgtcgtgcgcggtgggagagaatatcagatcgatatgcatctgaagaagaaccgcgccaaggggattgccatcgacaagattccgatcaaaaaagccagtgagcttttcggaattttaaatattgtctttttttcaccggaagatctgaatattatcaagaacggtccggcggagcggcgcagatttttggattccgaattgtgccagctggatcggatctatctggcagacctcacaaattacaataaaatcttagcgcagcgcaacaagctattaaaagatatgatctatcgtccgagtctttccgatacgctgcccgtctgggacatgcagcttattgagaccgggaagaagatcatccggcgcagaaaacagttcgtggatgaactccgggagattgtaagtgacattcattaccgcatttccggcggaaaggaagagctttttttaaaatatgagccgaatatcgacgatatcttttttgaagatgagttgagcagggcgaaggaaaaggacaaaaagctttgtcagacatcggtgggaccgcacagggacgacctgctgttctcgatcggtgacgtcgatatccgaaagtacggttcacagggacagcagagaacatcggcgttgtcgttgaagttgtctgagattgaacttgtgaggaagtccatttccgatacgccggtgttgctgctggatgatgtgttgtccgagcttgacagcagccgtcagaattatctgctgaacaatatttccgatacgcagactattattacctgtacgggactggatgaatttgtgagaaatcgttttacggtaaaccgggtatttgaagtcatagccggtcatgtatatgagcgatcaatatagtaagcgtgagccgtttttctggctgatgcagaaatggagaataaaatgggtacagaaaatgaatacggagcagatcaaatccagatattagagggacttgaggcagtcagaaaaagacccggaatgtacattggaagtacatctgcgagaggacttcatcatctggtatatgagattgtagataatgcagttgatgaggcgcttgccggatattgtaaaaatattgaagtgacgatcaatccggacaattccatcacggtggaggatgacggacgcggtattccggtcgggatgaatcacaaagccggaaagtctgcactggaggttgtatacacggtgcttcatgccggcggaaagtttggcggcggcggatataaggtatccggcggtctccacggagtaggagcatcggttgtaaatgccctatccacgaagctttctgttgaggtatacaaggatggacagatttacagtcagagttataagattggcaagccggatgaacctgttaaggttatcggtaagtgttctgccgaaaaacacggaacgaaggttaccttccatccggatccaacgatctttgaggaaaccgtctatgattacgatacgttaaaacagagactgcgcgagaccgcctttttaacaaaaggcttaagaattgtgctctccgacgccagagtggatccggtgcatacacacgaattccactatgcaggcggtatcaaagaatttgtgacctacttgaacaagagcaaggaagcgctttatccggaagtcatctactgcgagggaaccagggacggagtctatgtggaagttgccatgcagcacaacgattcctacaatgatgcgacttacagctttgtcaataatatcatcacaccggaaggcggtacacatcttgccggtttccgtaatgcattgacgaagactttcaatacctatgcgcgtgcgaataagattttaaaggatacggagccggcgctcaccggagacgatatccgcgagggactcacggcgatcatcagcatcaagatcgaggagccacagttcgagggacagacgaagcagaagctcggcaacagcgaggcgcgaggcgccgttgactcggttgtcagcgagcagctcacctacttcctggagcagaatcctacggtggcgaagaacatctgtgaaaaatcactgctcgcgcagcgcgcgagggaagcggcgagaaaagcgcgtgatctcaccagaagaaagactgcacttgagggaatgtctcttccgggcaagcttgccgactgttcggacaaagacccgaagaactgcgagatctttatcgtagagggagattccgccggtggttctgcaaagacggcgagaagccgtgcaacgcaggcaatcctgccgctccgcggtaagattttgaatgtggagaaggcaagactggacaagatttacggcaatgctgagatcaaagcgatgattactgcgttcggtaccggtattcatgaagattttgatatcagcaagctccgctacaacaagatcatcatcatgaccgatgccgatgtcgacggtgcacatattgcgacgctgatgctgacctttttgtaccgcttcatgccggagctgattaagcagggacatgtctatctggctactccaccgctctataagatcgagaagaacaagaacgtgtggtatgcgtacgatgataacgaattaaacagcattctgacagagatcggccgcgacggcaacaacaagatccagcgatacaaaggacttggtgagatggatgccgagcagctctgggagacgaccatggatccggagaagcgtatcttaaagcgtgtcatgattgatgaggagaattcttctgagattgatgtgacgtttacaacgctcatgggagacaaggtagagccacgccgtgaatttatcgaggaaaatgcaaagtatgtacagaatcttgatatctgacagacggactgtacagagtatgtaattgatagaaatggagaaaaatcctatggatgacaagatttttgaccagatacatgatgtggatctgaagaaaacaatggaaagttcctacatcgactatgccatgagtgtcattgcacagcgtgcgttgccggatgtaagagatggtttgaagccggtacagaggcgtgtcctctattccatgattgagctgaacaacggaccggacaagccgcaccgtaaatgtgcgcgtatcgtcggtgatacgatgggtaaataccatccgcacggcgacagctcaatctacggagcactcgtcaatatggcgcaggactggtcattccgttatccgcttgtcgacggacatggaaattttggttccgtcgatggtgacggcgctgctgctatgcgatacactgaggcaagactttccaagatttccatggaaatgcttgcggacatcggaaaagatacggttgattttgttccgaacttcgatgagacggaaaaagagcctacagtgcttccgtcccgttttccgaatctgttagtcaacggtacgaccggtatcgctgtcggaatggcgaccaatattccgccgcacaatctgcgtgaggttattaacggtgtggtaaagatcattgataatcaggtgttggaagaccgcggaaccgatatcgaggagcttttgacgatcgtcaagggaccggattttcctaccggaggtacgattcttggaaccgccggaatcaacgaggcataccggaccggacgcggaaaagtcagagtacgcgcggtgacgagcattgagccgatgcagaacggcaagaaccgtattgttgtgacggagcttccgtacatggtaaataaggcgcgtctgatcgagaagattgcggagcttgtcagagataagaaaatcgacggcatcaccgatctgcgggatgagtccgaccgtcaaggtatgagaatctgcatcgaactccgccgtgatgtgaacccgaatgtcgtgctgaaccttctgtacaagcatacacagcttcaggatacgttcggtgttattatgctggcactcgttgacaaccagccgaaggtcttaaacctttacgagatgctcaactattacctgatccatcaggaagaagttgtcaccagaagaacgaaatatgatctgaacaaagcggaagaacgtgctcacatcttacagggattattaacagcacttgataatattgatgaagttatcaacattatccgcagcagcaagaacacccaggaagcaaaagaccgcttaatggagcgttttgcgctgacggacgtacaggcacaggcgatcgtggatatgcgtctgcgtgcgctgacaggtctggaacgcgagaagctggagaacgaatacgcggaattgatggagcgcatcacagagttgaaggcaattcttgccgacaagaaaaagctgctcggcgtcatccgtgaggagattcttctgatcgccgacaagtacggggatgacagaagaacatccatcggttttgacgaatatgatatttccatggaggatttgattccggttaccaataccgtcattaccatgacgaagcttggatatatcaagcgtatgagccttgacaatttccgtgcgcagaaccgcgggggcaagggaatcaagggaatggagaccattgatgacgattacatcgaggaacttctgatgacgacatcgcaccattacctgatgttcttcacgaataccggccgtgtataccgcatgaaggcttatgagattccagaggcaagcagaaccgcgcgcggtaccgcaatcatcaacctgcttcagctgcagccgggagagaagattaccgcggtcattccgatccgtgagtacaccgagggacatttcctttttatggcgacgaagaagggtatcgtgaagaaaacgccaatcacggactatgcaaatgtgagaaagacaggtcttgcagccatcaatctgcgcgaggacgacgagctgatcgaggtgaagaagaccgataataatcaggatattttccttgtcaccaaatacggacagtgtatccggttcaaggagacagacgtaagaaaaacaggcagaacatccatgggcgtcattggtatgaacctgacagacggagatgaggtcgtcggcatgcagatggaatcccagggagattccctgatgatcgtttccgaaaaaggtctcggaaagtgcacgttaatctccgagtttaccacacagaaccgtggcggtaagggtgtgaagtgctacaagattaccgagaaaacaggtaatatcgtcggtgtcaaggcagtcaaccatgacaatgaaataatgttaatcacgacagagggtatcattatccgcattaaggtagcggatacggcacttcttggacgtattacctccggtgtcaagctgatcaatctggacgagaatgtgactgtggcaagcattgcgaaggtgcgcgagaataaggagcttgagacagccgatacttctgagcttctgaccgatgaggaagaggcggcaagcgcggctcttgcagcagaaaatgcgaagaaagcagccggtcagtcagacaattccgagacggatgacgagctgatggatgagctgttgaagcgtgctgaagacgatgccaaggatgacagtgacgaggaataagcatttttctaaaaataaaagaaaaataaaaaatataaaaaaaatataaagatacatttgacatcgtatagccttttctatatgatagagtgtgaagagagattttactattaaggaggaacaggttatatgagtacttatggagcaattcttggagcaagcatcggtgtcattctgttatgtcttgttgttatggtagcatgctatgtgttatatgcagtttcccacatgaaggcattaaaggcactgggatacaaaaatgcatggcttgcatggattccatacggtgtattttatgcatgtgcggatgcagcagcagagggggaaggcgagaaggtaaagttatttggaagccttgaacttccggcaatggtattcaagctctggtggattttaccgcttgcactgttgtttattccggtaaacggcacggtagaaaatgtcatcacaatcgtattaaacgttgtattcttaggatgcagctacgctaagatgtatgcaaagttagagggcaagcaggagagcgagacacaggcaatcggctgtgtatccggtctgatcccgatcattgcagttgtaaaattcctgtcttataagggaaataactaaaatcgaagatgtatcggaacccgcggtcaaaagaccgcgggtttttcttattcctttatttacttttgaaataccaggtgttatagtaaatcacggatgatattccgcagcgcggaaatgataccggagaagaaaagagaacgaaccctagatcgccagtttccgacgggacgtggatcgaggagaccatgatttcacaggaaaggtgccgcatactgcttccgggaggaggcgtttgtatttcattgaatgatgtacagaccgaacgtatgcagatcggttttatcggtgccggcaaggtcggcgtgtcacttggcaaatattttaaagaaaagggcaggaacgtaggaggttattacagcctgacccgcgcgtctgctgcatgggcagctgcatttacacagacaacctgttatgaaagtttagaagaaatcatcagcagttgcggcatgattctatttactgtaccggattccgccatcgcagaagtgtggcggcaggcaaagccctatgtatccggtaaagtgatcggtcattgcagcggtctttacagttcagacatcttttcagactgggacagcatgaactgtcatgcatgttccgtacatcctcttgctgcaatcagcagcaaagaaaatgcatggagagaattatccggcgtattgttcacactcgagggagactcctcctatgtgaaggatctggagacatttttccattccatgggcaatcgtactcgtatcatttccaaagaagacaaaatcaaatatcacgcggcggcagcaatctcatccaactatatgactgccttattttccatgtccgagcagctacttctcgactgcggattcgcacaggaggaagcgcgaagcgagctctatgcacttgcaaagggaaatctggatcacattctgacacagggatgcgtgcagtctctcacaggtccgctggagagaaatgattgtgcgaccgtagaaaaacatatttccgcgttaaatgtaaaacagcggaaaatatatacttcctgtgccgaatatctcacagatctcgcacagagcaagcatccagatcgtgattacacggagatgagaaaattgtgcagaaacggggaacacagcccgggcgcggaatgcgcggaaacagtgtgaacaggaaaacacagtctatgcgcctggggcgcaggaaaagtggagggaaacatgaaaaacacagtattgacgttacagaagcagaaggaagaacacgataagatcgtcatggtgacggcttatgattacacgacggcaaagatcatggatgaagccggtgtcaacacgatcctcgtcggggattcattgggaatggtaatgctcggatatgaggatacgctctctgtgaccatggaagatatgattcatcacacggcagcggtttcacgcggtgcaaaagatgcatttgtagttgcggatatgccgtttatgtcctaccagacatccgtgtacgacgcagtggtcaatgccggaagactgatgaaggaaggccgcgcgaatgcggtaaagctggagggtggtgtggaatttgcacctcacatcgaggcgatcgtgaaggcatccattccggttgtggcgcacatcggattgaccccccagtctgtcaatgcattcggtggattcaaagtgcagggaaaagatgtggaggcagcgaaaaagcttctggccgacgcgaaggcagtggaagcggcaggtgcctgcatggtcgtgatggagtgtgtgccggcgaaactggcagctaagatatcagaagaacttacgattccgaccatcggtatcggtgcgggagcaggctgtgacggacaggtgctcgtctaccaggatctgctcgccatgtatggtgatttccgtccgaaatttgtaaaagtatttgcaaacgtaggagaagtaatgcgcgagggcgtcaaagcatatatcaaagagacaaaagagggaacatttccgggcgaggaacattgctttaagatcgatgactcagtgattgaaaagttatactaaatgacagatcatgccgaaaggagcagattatgaaaatcgtatcaaccatagaagaagtaagagcacaggtgaaggagtggaaaaaggaaggacagagcattgggtttgtgccgaccatgggctacctgcatgagggacatatgagcctgatcgatgcagccggagagaatgacaaggttgttgtgagcatttttgtcaatccgatgcagtttgggccgacggaggatctcgcaagctatccgagagatctggaacatgatgcgaagctctgtgaggagcacggtgtggatctcattttccatccgacaccggaggagatgtacggggatcagttttattcttatgtggatatggatgtgctgaccaaggagctttgcggactcagcagaccggtacacttccgcggcgtgtgcacggttgtgacaaagcttttcaatattgtaacgccggaccgcgcatatttcggacagaaagacgcgcagcagctcgcggtcatcaagagaatggtgaaagatctgaacatgccgcttacgattaccggctgtccgatcatccgtgaagcggacggacttgcaaaaagttcccgcaacacctatctgtctatagaggagcgggaggcagcgctcgtgttaagccgttccattttcctcggaaaagagatggtggaaaagggagagcgcgactgcaaaaagattcttgccgcaatgacagcggagatcgaaaaagagcctcttgcaaagattgattatgtaaaaatcgtagatcttgacacgatgcagcaggtggagaagatcgacagaggaatccttgccgcgatagcggtctatatcggaaagacaagactgatcgataattttatgtatgaattggagaactaggcgatgacaattaaaatgttgaaagcaaaaatacaccgcgcaacagtaacacaagcggaattagactacgttgggagcattaccgtggatatggatctgctggagcaggcgggaatcctggaatacgagaaggtacagatcgtggacgtcaacaacggctcccgctttgagacctacacgattgccggagagcgaggcagcggcgtgatgtgcttaaacggtgcggcggcacgcatggtgcagaccggcgacaagattattctgatggcatacgcgcaggtgacgccggaggaagcatcagagcttcgtccaacggtgcttttcgtggatgagaaaaataaagtcacaaaggtgacaaattacgaaaaacacggagaaatcggataatataggattgtttcataaaattctatggactataatgattcttatgagtacgtggagaaagcacgggacaaaggagaatgattatgccgcagaatttttatgaactggtctggatttttattatctatgcatttatcggttggtgtaccgaggtatcctacgctgcactcgataccggaaagttcgtgaaccgtggatttttaaacggtccgtactgtccgatctacgggtgcggcgtggtgattgtggttgccatcctgacacctctgaaagaaaatctgctgatcctgtttgcaggatcttttcttcttacctctgtgctggagtatattacaggttatattctggaaaaagtatttcacaacaagtggtgggactattctgacaaaccattcaacatcaaaggttacgtctgcctgaagttttcgatctactggggactggcatgtacctttatcatggatatcattcatccgatcatttatgcagccatccgctttattccgttcgtgcttggcgtagtgctgctcagtattatcatgtgcgtgtttgcggcagactgcatcatcacggtgacgacgattctgaaattcaataagcgcttaaaggtcatggatgagatggcggcgtctattcaccggctgtccgatgagatcggcgaaaatatctatgaaaatgtgacagacgttattgaaaaatccgagaaattccaggaaacacatgtggagctgatggataagatcagcgagacgaaggaaaatatttacgggctgccgcagacagcgaaggataaacttgcggagacaacgggagcggcgaaggataagcttgcggagacgacgggagcagcgaaggataaacttgcggagacgacaggggcagcgaaggataagcttgcggagacgacgggagcggcgaaggataagctttcagagaccaaggagagtatttcggaactgccgcagacagcgaagaacaagcttgccgagaaggcagagaattatgcagcttcccgtgaggagaaaaagcgcgaacgcgaacttgcactcgaggagaaaaagcgcgagcgcgcagaacttatggagcgctacgagaagctgtacgaggagaaaagctttggttttcagcgtctgatgaaggcattcccggatatgaagtcgcgggataacaacgagacgctggaaaaattcaagattcactttaatatcaaaaagaaagacgaaaacaaaaaagatcaggcatcctaaacgccacatacacagcagacagggagaaaaagaacggtatgataagaacaattcaaacagatgagattacaaaaaatatcaaagaaatgtgtatacaggcaaatcattatctgtccgcggatatggatgcggcgatgaagcatgccgctgacacagaacagtctgaactcgggaaaaagattttacatcagctgcaggacaatttaaagattgcggacgaggagatgattccgatctgtcaggacaccggaatggcagtgatctttctggaagtcggacaggatgtccattttgagggcgcagcgattgaggatgccgttaacgagggagtccgtcagggatacacagagggattcctgcgcaaatccgttgtcggtgatccgctcattcgtgaaaatacaaaagataacacgccggcagtcattcattattccatcgtgccgggcgatcaggtaaagatcaccatggcgccgaaaggattcggcagtgaaaatatgagccgcgtgttcatgttaaaaccggcggacggcatcgagggagtcaggcatgcgattcttaccgccgtaaaggatgcggggccgaatgcatgtccgccgatggtcgtcggagtcggcattggcggtacatttgaaaaatgtgcgcttctcgccaagcaggcgctcacgagaccggtcgatgaacattccgatatcccctatgttaaagatctcgaggaagagatgctttcaaagatcaatcagcttggaatcggaccgggaggactcggaggaacgacgacggctcttgcagtgaacatcaatacctatccgacacacattgcgggacttccggtggctgtcaatatctgctgccacgtgaaccggcacgttgtaagaacactgtaagagaaaatatgccggtttttccacaaacagaaaatgaaatgttgataagcaggatgatgagagggaaagatatggataaacatattgcaacaccaattacggaagaggttaccagagatttaaaagccggggactatgtctatctgacaggaaccatgtatgtggcgcgcgatgcggcacataagcgcatgatcgaggcattggaccggggcgaggagcttccgattgacatcaaggatgcgacgatctattatatgggaccgtctcccgccagggagggtcgtccgatcggatctgccggaccgaccacagccacccgtatggacaaatacgctccgagactgttggatctcggtgagaaggcaatgattggaaaaggaaagcgttcaaaagaagtgattgacgcggtgatccgcaaccacgccgtctattttgcagccatcggcggagccggcgcactgctttccaaatgcatcacaaaatctgagattgtatgttatgaggatctcggcgcggaggcaatccgcaagatcgaggtaaaagattttccggtcatcgtcgtgatcgaccgcgagggaaacaacctctacgagacagcaatccgacagtatcacacattagaagaaatgtagcgggtcattttcctgcaacaaaaaagagcctttcggctcttttttcttccggtcttattccagaacaagcagcagagacattttgaaacgtccctttgcggttacgctgtgcagaccgttcttctcaaaacggaagctctcacctgcgtttaaggtatagtcggtaccctcgtatccgatgacagctgtaccctcaagcgcggtcaggattgcgttgcccggtgcgcggtgcggtgtcagtccggttccctcatcgaatgccatgaggacaaacttcattgtatcattgtgtacgatatccacgtttgcaatacttccctcctcgtaagagatcagtttcttcagattcaatacctcttttgctttaacaagatcgttcatagtgttctccttttttgtaataatttctgtatagatacaaccctcgccggttttgacgccgcagagagttttttccggtacgagcaatatctcatccgggtgcagatccattgtttccggctgttcaccgatgagaaacgttccggtgccggcggctccgatatagatggacatcgtatcgtagctttccggtgtgatggatgtgcctgcgcccagggaaaaccaggtagcggaattggaagtgccgagtccggtatttcgtgagatggtcatctccgcgcggatcgggcgctttgctgcgatggtaaatacgccttctgacatagtagatcctttctgtcacatcgctttgtctgtcagggagacaggtacgatgctttttatttttttctgatgatggctgaactcattgacaaccacattgacgtcaaaggacacggaaatattcttttctgtcagaactttttccgtgctgccgtagaaaaaagtgcctttgtgattcatcataaaagcctcgtcggcgacagacatggcgttggtcggatagtgcgtgttcatgattgcgctgatgccgtcctcgtgggagagccggtcgatcatgttgagaaccagaatctgattgtgaaaatcaagacctgtttccggctcgtcgagaatgatcagcttcggttcattgatcagtgcgcgcgcaatcagtaccatctgaagttctccgccgctcatgcggttgcagtcctttttggcaagatgcgtgatgcctgttttctccatcatggcttccgccatctcaatctcccgtctgccgggctgttcaaaaatgccaagatgcgaacagcggccgagcatgaccatttccagtccggtgtaggaaaaagcaaaaccgtggctctgcggaatgtaggagacattgctccacaattcctttggttttaatgttttgatgtcctgcccgtacagaaaagtcgcaccctctctccaggggagcagaccgatcatgcattttaatagtgtggtctttccgataccgttgggacctaagattgctaaaatatgaccttcctctaatgagagattgatatcagctaatattatatcctgtttgggatatccaaaacagccattttttatttcaagaatcattgcagattgctcctgttcttattcagcagtgaaataaagaccggtgctccgatgatggcggtcagaatggacagcggaagctcgatgacgctgatggttcttgagagtgtgtcaatcagaatcataaagcttgcaccgagacttaagctgatgggaaccacataacggttgttgcttccgacaagcattctggcgcagtgcgggactaagagaccgatccagccgacctgaccgcacatggataccgccgaggcagtaatgactgtcgacgccaggatgaatatcatctgtgtccgttttaagttgatgccgctggctttcgcttcatcctcgcttaaggataaaatattcagtctccatcggagcagatagatgacgacgattccaatgagaatgagcggagaaccgatcagcaattttttataagtggcgcttgtgaagctgcccatcagccagtaagtaatttccggaagcttgtcctgtgggtcggccgtatatttcagcagagagccgatggcgttaaacagggaggaggcgatcacgcctgccagcacaagatagaccacctggcggttctcattttttcctgcgatctttaatgtaaaaaatacggaggcaagtccgaacacaagtgcaatgagctgtgtctccagaataccgcaggaaaggatgatcgcaaggatcgctcccacgcaggtgccgctggtaacaccgagaatgtccggtgttgccagtggattggaaaacagcgattggaacgtgtttcccgcgcaggtaagacctgctcccacaataattgccatcagaatacgcggcagccgcagattgattacaatggagtaattctgcgcatgtccttcatttcccgtgagaacatcgcggaaaacagcgatcacgtcgccgaccggcacattcattctgccgaggcagatacagatcagtgcggtgacaagcggcagcagtatcatgaagagaatggcaagcggtgtaaaatgcccccgtttgatcaaaaaattatcattcatcagtactgaagcatttcctccatttcctcatcggtaacatcgtagccataccagtcatggtaatattcacggatggtatcctccagaggatagtctgcgaaaacttccgggtaagtgttgcatgcaagccatgcgaataccagcggagcgtccgggtttggtgtaaaccagttccacatgccgagcgttgtgtcatagacacgtccgtcctgaacagctttgatggaggaaaaatcggttccctctaccctgttctccagcacgtcctccgaggtaagaccgatgagtcccggaccgtcgacaaacagaatatccggattccagtcgtagatctgttccatgctcacctgtgtaaagccggttgcctccgcggcaacgtccgtgacacctaagtgtttcatccagtaggtaccaaaggttccgttgccggatacctgcggtacgccgtcgctgtatttccacagaatcagtgcgctcgggcgctcatcctccggaacggctgcaatccttgcctccacatccgcaacaatctcgtcgccggcagcagtgaaagcatcggtcttgccttcctcaccgaagacatcctccagaagatccagccactgtttgtagcggtttaacggatcagcttctgtctcgtgaccgacggttgcaaatccgatacacggaatgccgctctcctgtaagatctctgcgtgtgccgtattgccggcattgtataagatgacatccggttctaacttcatgatttcctcgatattcagatcactctgtgcatagacggtatccgcggattccatcagctccggtgcgatatttttgagaaccgtctttgagatggtatccttgaaagaaccgcagtagcctacgatataaggagcttccccgccgaaataggacatgtaggtggagagaatcggaatctggtcaatcactacgcgggtaatgtgattcggaacttccacagtgttgccggcatggtcaaccacagtgtgggtgccggtgtcctcggtggcagcagtttcagtgtctacgctctccgccgattcggaagcggcagcagtcccggtggctgctgtggctccgttatctgaagtattctctgttccggaagccgtattgcttccgcaggctgcaagctgcagtaccatggcagctgtcaataatgcagcggtaagttttgtcttttttatcatatttcctccctctgaacggtatcagtatgtgattattggttagttaaaactaaccaacgagacatagaatactggaaaaggaaagaaaaagcggttgctattgcaaccgcctcaaaaaaagattatattgccagaaaatccggatcaagaatttgcagcctggaacccgaaaaattcagaatcccctcgtcgcgcattttgcaaagttcgcgggagagagcgctccggtccgcgtagagatattccgagagttctctgcggctgtaaggaaggcagaccgttccgtccggtgcgatctctaacgtctgcagatagatctttaacttgtcccgcagctttttctgactcagaatccgtattttgctgttaaaaaacatcacctggcgcgcaaattcctgcatcagattggtggtgacctgcatacggcaggagcaggaaaatgttttttccgacaagagcgctgcaaaatcgagcatcaggatcttgcttttttccacggtgtgaatgtagacatggctggccacctgtccagcgcacacagactcggcgccgaagacatcgccgcttcgcagatgattgatgatgatctggtttccgttttcgtcgaccagatattcttccagcatgccggtgagcagaatgccggagcagccggaggaatccccgagtgcggcgatggatgcatcctgcggataatcgaccacgcgcgcatttaagcagcgcaggacattgggatatttatcttttggtaattgacggaagatactggaatgttccagtacatcctgatatagagctgtttcaataatcatatatttccggttgccgctgcaaccgccctccgtttttgaaatcaggaaaaattatgagttagtcaactctaacattataactttgccgacaggagaagtcaaggtttacataaaatcaatttcggggaggataccatccgtccggggatcgaaattcagaagtgaaaaacagaaaaaaatagggtataatctggatatgcggaggtgggaagggtatgatactgaatacaggaagcaggacagacataccggcgtattacagcgactggttttatgagagggtccgcgcgggagaagttctggtgcgcaatccgtattatcccacgcagataacaagataccggcttgatcctgcggtggtggatgcacttgtattctgtacgaaaaatccgctgcctatgctggagcgccttccactgctggatgcgtttaccatgttctggtttgtgacgatcacgccttacggcagggagatagaaccccatgtgccggataagaacctcgtcgcggaggcattttgcagattgtcggagagcgtgggaagagaacgtgtcagcttccgttacgatcccgtctttttaaatgagacctacaccgtgcagcatcatgtggaaaacttcggggagcttgcagagaagctgtccggatataccgggcagtgtgtggtaagttttattgatttatatgaaaaaaccagacggaactttccgagcgtaaggagcgtcggaaaggaggagcaggagcgtctgattgcagcgttttccgagatagcggtaaagcagcatcttcagattcatctgtgctgtgagaaccgtagtcttgtccggcagaatgtggatgcggacggctgtttatcgcagtctgtattggaacgtgccatcgggtgcagattaaaggtgccgcagcagaaacgggcaagaggcgagtgtccctgcctgctcggcgcagacatcggtgcttataacacctgcggacatgaatgtctgtactgctatgccaactatgacagccgcaccgtccgggagaaccggctgcagcatgatccccgctcgccgcttctgatcgggcatgtgcagagcacagacattgtaaaagatgcaatccagcgttcctggaaagatccacagatgagtatttttgatttgtattgataaaaaaagtaaaatcatgcaggaggtagcacaatgaaaaaagagttgaactgggcagtattgggatgcggtgtcatcgcaaatgaaatggcacaggccctagagcatatgggaaagcatctctacgcggtcggcaaccgcacacatgagaaagcggtcacatttgcggagaagtacggtgtacagaaggtatacgacgattttcaggaaatgttccatgatcccgacgtcgatgtcatttatattaccacgccgcacaatacacatatcgaatttgcccgcgaggcacttgcaggcgggaagcatgtgctctgtgaaaaatcggtcatgttaaacagccgtgaacttgcggaggcgattgcgcttgcagaggagcaccacgttgtgtttgcagaggcgatgacgatctggcacatgcctttatataagaagctctggcagattgttgagacgggggatggagagattccggcactcgggaaggtgcagtttatccagctcaatttcggcagctacaaggaatataatatgaagaaccggtttttcaacatgaatctggcaggtggagcactcttagacatcggtgtctatgcactttccattgcaagaagctttatgtcaagccagcctgatcaggtactttcccaggtaaaatacgcaccgaccggcgcggatgaacaggagggaattcttctgatgaatccggacggacagatggcggcgctgtcgctgtccctacactccaaacagccaaagcgcgctgtaatcagctgtgaaaaaggatatatagagatcatggaatatccgcgcgccgaccgtgctatcgttgtggaagcagagaccggaaaggtgcatgagatcacggcaggtgcaacggcggatgcattattgtatgaaatgacagacatggaagacgccatcttgaacggaaataccggggtgatgcggttaaaagatacccgtgacgtcatggaactcctgaccggtctgcgcaaagagtggaacatgaaatatccgggagaagagtggtagtaatacagtatattcttatgatggtgtaaagcaagcatcagaatatttacagagtcagggtgttccaagagcatatagaaagcagatattggagtcttttgatgtagaaacaataaaacttcaaactgctggagaaagtacatatggtttaagattttacggaggaaatgcaaatgcagagggaagatatttatttgaaacattttcacctttaacaaatcgacagaatttagctttgccatatgagtggaatagcatgacgggaattcagcagttccaggttagaaacggaactacaatgattacaggaaaggccgctgctcagaagagttttggtagtcaatacattggtggtgcgaatcaatggtatattaacaatttggaggatttgataaaatgtcgttagaagagaggtttaataaaaaaaatagcgaattgcaacagaaaatagaggtggaaatagtaaaagtaaaagagggacaaagtaagagaaatatggttcagttgcaaactatattgattgaacttcaagctagtagtagacagagaaatgttactttgagctatcctcgaattataattgattcatgggattattcagaccagttaggtgtggagttggtggagttggcagaattatataaaaaaatataactgttattcttgtttatgtctccacttaaggacacccaccacctaaaaaacaaaccacggtctttaaattaatcgaaaaggctttcattgaaggtgatattatacatggattaatttagagacctcagaactgggaacacaaaagggcatctgaaacaaatgtaacaattttgtaacattttccttaacgccccaaaacatccatgttacaatggcactcaccaggggggataagggggatgagaattcctcataatacctaaacaaaaacacagaatcggagatgttctttaggcaataaaagccttggaacatctccgattttctgttatatggaaatcccgataaaattatcccaaagcataacaaatttttgagtggcaggaaaagttatgccataccacatttctcccaacggctctgccggtgggtgtttccggcttgggccgtcctccggcggcataagtcctttaacctgcactattttcgacactacttattttggcggtatctcaagaaatcatgtctttcacatttccccaacaaggctcaataattctattatgggtaatatacctcgacttcggtcttaaaatcgcacacaggggcaacacaggctctcacaggggcaagagaaagttgatttgtctgtctaaaaaatgaatttgtgcatatttacggttttttctctgtttttggtctatggcataaagccaattctgtcttcacatcgccaaagtttcctccgatttttcaaaacaaaaattttgacttgcaactgttctttttcagagttaacatcacacaccacgaaggagatttcttctgcttcgtgtcctgtgttctacaggatgtatccatctccatgaaagtcagcggtgttcctttgcggaatattttgtgcctgaccagaagtggataggctataccactcttgcacacttggttgctgaaaagatgcgtaattccgagaaagatgcttaacagttgagattgccactattttgccaaacattgagattggagttgattttatggttaaagaaaattttatttatgtgggtatcgatttacacaaagaaacccacacagcagttatgattgactgctacaatcaaaagcttggagagattacttttccaaacagaccagccgattttcctaagctggtaacaaaggttaaaaaatgtaatactgatgcaaaagaagtagtctatggtctggagaatgcttatggttacggcagacctttagcggtgtggctgattgataaggggtattttgtaaaggatgtaaataccgctatctcacatcgacaggcaaagcaccggggtgccatgtatcgcaaaagtgacagtgatgatgcggaagccattgcacttgcaacattaaacatgcttgataagcttccggatgcttgtccgaacgatgcgtactggtcactcggtcagttggtgcaccgcagggacaatatcatgaagcaaagaacgagattagtcaaccaattgcatgagcagttgtgtattgcatatccgtcttataagcagtttttcaatgacatcagcagacccactgcactgtatttttgggagcattacccgtctagaaagtatttgaagggtaagagtgtggaagacctacgaacagaacttgttccggtcagccacaatagatgttcgaccaaaaactgtgagaaaatcttggatgcggtagcaagtgacaaggtaaaaaataatgcttaccaagatgccagggacatggtgactcttagcatcgtcagtgatttacagcactatgacagccaactggcagaggtagacaagatgctggaacagatgtataagatgcttggctgcacgcttacaaccattcctggtgtaaatgttatcacagcagtgaagattcttgctgaaatcggtgatatcaaacgatttagtaatgctaataagttggcacagtttgcaggaattgcaccgcttcatttatcatccagcggaaagggtaaggatgtagctaccaagcaggggaacagacgattgcaggctacgatttacttccttgcaattcaaatggtgcaggtatcctcaaagagtacaccgagaaattcggtggtacgggcatattatgagaaacgtaaggcagagggaaaaaccagtcagcaggcactgatttgcatttcaagacggttaatcagtattatttatggaatgttaaagcatggtacggaatatcgtatgccagtggtggaaagtgctggcgaaaagtagtgaaataatggcaaatatgtagtagaattttaagcagatgtgatagtcagctttgggaagtgtacgcattttccggaagagtggcatcggcttggattattataagggtaaagagtttatgtcaagagtggtaaaacaactagtttgacacaaaaaaatgtaggagtaccaacattaccagaaggttcacaatgggaacgaaatgttttaaattcctttgcaggaggaaaagcaacacctactacgtatgaaggcgggactacattatatagaattggtggaaaaaatggcggattttggagtttagaaccacctcctgcaactgaatatcaatggagagtggattatgcaattaaacaggagttctgtaatgatgcatctactttatataagatgactataccagaaggttcttctttaggagctttagaaggaaaagttggaccacaaggaatgggattatatgatggggcacatcaagcatatattgattatagagcagtacctgcagattggattgagataacacctgcaacgtggaagtgagaaaattatgaacaagattgacgacgaaaaacataacgaattaatagtaatattgagtgagttaatagaaattattgaattaatgaagaaagaggaaaaagattatttattgattcagaatgaaaatgaagccagagattggatggattttttaaagaatcatacagataaagacgaattgaaatctttagaaaatgaaatatcagataggtttttctttaagtttgatgttcaaattggaacatcagaactagataataaaagagcggaacttatgaaaaagtatatatttaagtcaaatgaatatttaaaatagttataatcagggttatactttcggacattcagaagaactgttatgatgccgagggtcttcgtgcagagatggaagagaacggcagattagtgcagttcctctataatgaggatagggaagtagtcgcagagaaagactgcagcggcaacatcatccgttatatacgtggactgggcttaatcagttctgacagcgagaacgccaagacgtattaccattatgtatccgatgaacagggcagtgtgagccatatcatcagagatgaggataaggagagcggagtatcagcacagggaagagagcaggacagaatactcaatcaatatgagtatgatgcctttgggaataccataagctgcaaggagcaggtagagaaccgcttccgttacatgggagagcagtacgatcctctgacgggacagtattacctgagggcaagatattataaccctgtcattgccagattcacacaggaagatacctactatggcgacggactgaacctgtatacctactgccggaataacccgatccttaaccatgacccgacaggacatggaacgaaggagaacagcccatacagcaggaaagaacagcagtacattgatgcaggggcagacccggatacagcaaagcttgcaacgcagtgctatcctgatgcaaactcgaaacaggacttatacaataagtacaagagtcagggatataatgcaacagatgcgaagaagctggcaaactatgagattgtccatggtgaggagagggcaaagaactatgctgccaacaatgtaaagaagagcggtcctgattacacaacgacttccccaagagataatgtcaacaccgactggagaacccaggaaaggcttaatgcgcagaagaaagcaagtaattcccaattgatgccaatgaatttgcagttctttgcggcaaaaggggatgaaagcggcagtaagagtggtaatgaatcaaacgtttgaggatatgaaagagatcgtgcggaagaatccgtttgcacagcatataggcatggaacttctcgaagtgacggaaggatatgcgcttgggcggatccgtctggcaaagcaatacgagaatatctacgggggaatgcacggaggctgtgcatattccctcgcggacacgctatccggcatagcggcatccacttacagggaatacgtcaccatgctggatgcgtcgatgaattatctgcttccggtggaacatacagagtatgtctactgcaaagcgagggtgctgcgccacggaaggaagatcacggttgtccgggtagaactgttaaacgatgagcagacgctcctcatagatggaagctttaccttctatagtataagaaaaagagacgaataataaaaatacgctgaatggattgtcgcaataagcatatcgtgctttggagtgataagtaatattataaaaagaccacaccgtgggatttcagctggaaatgcaaatggaaattcggttcaaaaaatgtggcatttctaaccagccggatgtttgcatcttcgatgatccgtgtctttccaagtttggagcactccgcgggtcatgtccgcatcccggaagacaatttgtaggacttttgtgtgtgtcccttattggcacctctgaacaaaacataaccgcgcgaagccgctgtctgagtcggcatctgccctattttcaatagcagatgctggcgagttcggttcgcgcggttttatattgtctgtgaagaggtgccattagggacaccagaaagtccgcccattgtctccggtgtgccggacatgcacccgtcggattgtccaaacgtggaagagacacggaatccgatgcaaacattcagccggaagaaatgctcacatttttctccaacgaatattccatttgcatttccacatgaaatcccgaagttgtgtttcttagtaatattacttatcgccctaaagagcgctatgcttatagcggcaattcctttgaaaataaaatttgaatatttccattgacaaacggagaaacttctagtattattatctatgcgtcacgacgcagaacaatatcatattgtcaaataagaactttggagaagtactcaagtggccgaagaggtgcccctgctaagggtataggtcgggttaaccggcgcgagggttcaaatccctccttctccgctttatttgaagatatgagttgttcaatttttttctgaaaaagttgttgacatacgcttcgatacatgatattataaatgagttgtcgcgtaaaacaagtaacacagacaacaacggcttctgaaaaagaagcaaaagaaaataaaaaaagttgttgacaaacggttgacagtatgatatagtaaataagctgtcgccgagagatgacaacagcgagtgaggttgaaaaatccactcagaagttgcgaagcaacttctaaggacaacgcaaagcgttggctgtacattgataactgaacagtgaataaaccttgaaagatcctaaatttcaagctgtcgatcaagagattgaaagagaattttccctgccgaaagaatggagcagacaggaacagattgattatacaaccgaatatattcaaaagactttcgtggacgagggaatgtgtgccgactggagcatacacgataagggcgacgggaacccacatgtgcatttacttgtaaccatgcgaccattcaatccagaccactcatggggcagcaaggaagtcaaggactgggattttgtcagagatactgacggaaatatcgtggttgatgaatcccacccggactggtggcaggataagaaaaatccagaccgtcatggaatccgtattccggtacttgatgaaaacggagtacagaaagtcggggcaagaaacagaaaacaatggaaaagggttctgactgacgctaccggctggaacaatccaaagaattgtgagttatggcgaagcgaatgggcaaagatgtgtaaccggcatttatccatagacaatctgattgaccaccgctcttatgaaagacagggcaaattgaaagtccctacgattcatgagggtgcagatgcaaggaagattgaggaaaaatatctcaccgggcagataaggaaaggttcatggaaggtcgaggaaaaccagatgataaaaaaacaaaatgcactgctgcaaaaggtaattgcaacctttggtaaggtatccggtgcattgtcgatgtggagggagtggttgaatgacattagaagaaagcaaagaagtaattcccatgatggaagcaatgattacacagatagaggaacagcagaatatcatggcagagatgcttcaggagatacaggaaaaggacgagaagctgatgtgctttcaggagcaggaagaacgattgcagcaattagagaaagaattgtcagagctgctacaaatcttaccggatacagaagaactgttgatgcttctggaagaaaagacagaccagatacagaaactcacagacgaaaatcagcaatggcaggaattggcacagaaattaaacagcgagaaccggctattgcagaaacagaacagcgaattactgaacttgaacagcaattagagaaaggaaggttgattgatgaacgaattaagaaactcaaagagcgacgatcaactggaagagttgcttctgctgacagagcagatgcaggaagaactcgaccagaaagaccggactatcagggaactgaaagtgcagctcgacgaatcgctgaccttgaacgagaagttaaacagcgagaacaaaacagagaacattcaagccttaaagaacgacttgaggaaaacaaaagaattgttgcagagcgagaaagagaaaacacacaccgtccaagccatgatagaggaatgtcgagataagcagagacaggcagaacaggaacgggattatgcactctcccatcagaaaaaagtagagataccggttgaaaagccggtactctatcaaaagtgcgggaattgtaaacagacagcttatctgaaagctaaggaaaagtatgatatgcagagggaaaaactggcaggcagatataaaacaaaaacagccatgtatgaagcattgatgtttctgctgatatggtattccgtatcaactactctttttcagatgatacggtcaaaaatatttatttctgattgcgtggtattctttgatacaatcgcaactttcacacagaccattgctggctgggttgtactggcaggaaagaacgtggcacagattagtgatggaatatccaatcctgtcgttgctggaattataaactggctgataagaatattgatttgcggtggatgtctggtgggtgtgggaatacttttggcattcatcgaaataaagattgcagggctatataagaaatactgttgggatatgattaccataatggtgatacttgtaagtatggcaatagctatctactttggggattggataaaggaagtattgccaatcaatctgctatttctcttattattcgtgcaactggtatatgttggaatcaggtggtatgtaaagggatggcgggaaaacagaggttatgtttaaaaataaaaaaattgtctgagacgcagcgaagtaaataaaatgagtagtattataagaagtcagcagtgcgtgaataaactgctggcttcttttttgatagatacagtcactctcagagagtgtgcaggatagtaaagtaataatatcaacatgccgatatagaaaatgcagggaagcattgtatttcaaagagtttgagatacagagcttctactaaggcagtggtcatcttgtaaaaatatggtctttgtgtgcgtaatatggtcgtttgatgatatgggactaggagaacaggttattttatccgataaagaaagcaaaggaggttaaagatggcatttatgccatctgttgtctggtgccgcaagggacacacacaaaagtcctaaaattgtctgctggcttgcgcacacagtccgtggagtgctccaaacttggaaagacacggatcatcacggatgccagctgcggcatggttagaaataccggattttgcgatcagaatttgccgccgcatggttatctggaacttttaagtatctgtttcttataatattacttatcagcccaaagcacgatatgcttattgcggcaattccttttgttcacagcggtccggcagtgcgccgccacctttttattttgcgtcttcacatgcaaccgtatccagaatggtgtggattctttctatataagagtgcttctcccgcaccttgcggtacccgttccatgcaatccgcttacgctcctcctcgtgctccagatagtatcccaccttttcacacaggtcttccagaccgtcgaagcagacgagatcttccccctccttaaaatagtacggaatctctgcctggtagttcgtcagaaggaagcccccacagccaagcacatcccagatacgcagcgggataccgctcttgatgttcggtatcgtaaagttcaggttgatcttcgacatgcggaaaaccttcggcatctcgctccagtagtccaccgacccacaatactgaatccgcagcagatcactgacatcactgttgctgtagacattgactttgtagtgctttgaaagttcaatcagcgcccttctccgctcgatctccgcaatcttgaatccaagcacggttgtctggaaaatcagccccagatccgaaaaagatccctcggatttttccagctgaaaatattcctgcagctgttcgagaatgttcgtggtcagcatcggctccacgatattcgctccgctgatgttaagctgcgcctccataacagcgtcaaaatatccccttaaatactccggcagcctgtttttgatcttgtcataggaattgcgttcatagaggcttcccacaaacgccacatctccgcggtatttctgcatctccgaatcctgtgtggcattccgtctttccgctttttccggcgccccgagcagcgcatccatccgctccgtatctaccgccagcgggagataccagatatgttttacgcccatcccgcggaactccaggtaattcgtcttatcaaacgtaaaaatgtaattgcaggcgtggaacaccgattcatggtacatactgatcagcggattgtcgcatgtccaggaaacatagttcacgcctgtgcgctcacatacattcgagatcaatgggaaatagttcaccgtaaataccatatcataatgcgtcccccggatcttctcctcgatcacccgctcaaattcaggacttacgtcatagcttccgagttcctgttcgatattgtccaccgtatgtccaatcagcaaaaaagtctgctcaatgtctctgtaattatatgctttccatcggtacatcaatatgtgcatagctgtacattcctctatcctatatatttccttctttgcagtactgcgcgcagagacttaccgcctttgttcgccttaccgcgcgcagaagcttacatttaccgctcccatcttcgcccatgtgcattcgtcaggtcagaaagcactccttcagatactccgcacggcttttccacgtatgaccgtctctcgccgcagcatatccacaatctgcaatctcctgtgcccgctccagatgtccaaacagatcaaacaccctctccggcagtgttccaagctcctgccgccggaacatcacaagttccctgccatcggtaaattcgcggcgcagataggtagaatcgtcggttaccaccaccgctttcgccagcattccattaaaaatccgatcgtgcgctcctgccttaaaccaggtcatcgtgttcaacacaattttggcatcgttcatagacggaaggatctccggcgcaagaacttttccacggtaatcaagatacgggctgccgctccactcgcactgatcccatcccgtaccatacgccgtgacccggattccgttttccaccagaatacgcaccgcctgctccctgaaaaacgaagtggcgtaggagtcgataaaacgcatctgcacaatgatctcctgcacgcgcttgtccgggatatcgcttcgccggtctttaagatactcttcaatgacttcctccgtcgtccggtccggatggtgcaccaattccgccagcacatcccccgccatcagctgtccgtccacttccgggatggaagacagatccggtatcatttttgccaccgtataaatcggaagcgctccggcatacagaacgtcaatccctctctccgcaagcggcttgtgccggcttcccagctccacccccgcatgcggaagaaaatccacctgatggatatttttaaaatatctgcggatatattttacgtgattccggtctgtgcagagcacaaccgacgtctccggcgccaggcgcagcggcttctcatagtgaaacggatgatccatcagaatgttgagatacgggatgccgtaatattcccagacatttctggtcccacccttttgtatacacgcatcgttctcccgtacgctctgtgccggcgcaggcacctccatatccagattgtatcccagattattaaatgtcacacatgaaaattcacgctccggcgaactgctctccgcaagcacagaaagcagtgcatccttgctctgcggcagccgcgcgtcatacacaaaggacgcatagcccatcgtctcaaaagcttcccgcaattttccggtaaataaatcaagtgtgtcgtatacaccgatgaaatagataatggtatgcttcaagatactctccttctatgagccgatcagaacctttttcccgtcaaatgcaaatccatattttctgatccgctccctcgcaattccgtctgccacaagctctgtctcatattgtttctcttctatctgctgcaacgcccttgcaacgcacgctttcatattctcgtctctctcccggtcaaaaaccttaaattccataatgtaagaattgccgttttcttcccgcgcgcggagaataatgtcatatcttcccagaccactctccctgtttgaccgtattgaaaactgatctgataaatctgccagcaatccaagcacaaagccatggtaaaagcgctctgtctcatcaatattaccacgccctgtgcctgtgtcaaagtaactgaaggtggatagcgtgaccatattcatatagtagttcatctcttctatattatcatgcagcaacgctcttctgaaatctccatagccagtatccatatcgttaaaccattcccgtataatgcgtcgaaacataatctccacttctttgttcgtcagcatcagcacatattcctgatcgttcttttggtttacgcgtagataccccgtcgcatatagaaggctgaaaatagccgattcccgatactccaattgtgcaaagtccagttgctcgtccatctccacatgtaacatctctccttcaagaagctgttccatcgccatcttcatattctttgaagactttcggattaacgagctcaccagtttattattacttgtattcgcccaataagtatcaaagatcccctctgcatcgataaactttgtgatcgaccacggattatacatatccctgcgctgtccaaatgtaaatccgtcataccattcttttactttttccctgtaatcgagcagacctactctggcaagtcccacctttacctcttcttccgtaaagccaaatgccgtctcatatttcgtactcgtttgtgtgaccacatctatattattgaggtcggagaagatagattccttgcatattctggtaatgcccgtcagcaatgctctccccagcgatggattcgttttaaaggaattattaaaaaaagcccccacaaaagaaaccatctcatcccaaaagctattaaagtaagcttcctgaagcggagtatcatattcatccagtaaaataatgggcttatgcccataatacacatagagcaaatccgtcagaagccgtacggactgcgcagccgtggacgcatccatgtcccatgatattctgccaaaatcctgtcgttccctttccgtgaaccgcgacatgtcaagtatccgctcaaagcggcgatatacctctacaataccataatttatctgccgaagcaccgcctcaaacgttgtccccttaacacctgcaaatgacagaaatataacggggaaacgcccttgcagcttgtgatagcttttctcttcccaaaccttcaacccctcaaataaatccgcacgattttcataggacacggaaaaaaagcagttcagcatgctcagattcaacgtcttgccaaaacgtctggggcgtgtaatcagcgtagtcgtctcgccagattcccaccactgccgaataaaatccgtcttgtctacataaaacatctgatcacgtcttaacgcctcaaaatcctgaatgccaaccgcaacgctcttcttgcctgtaatccgaacggtgtacgctctcatgcgccgcaaacactcctcttctccaggacgttctacatccactggaatccaccagcggctgccttctttgtatgcaccttcaatctgcccgtttgcgcaccagtaatttaccatacgcttcgtgacagaccattctgtagctttctgtctggatgtcatatattgcattgcatgccctcccctaactgccccaattataagcccgtgggtgggaaattgcaacgtcatttcccagttacttcccagttatttccttatatgttcttatccttatatcacatgcaaggatttaatgtaggcttccaccccggatctgttatgtaaattataaacccgatctatctgtccaaaatattcacgaataaaatggcagggttcccgttgtccctgccatcttcttttaagcattttcgatatcgctatcatcctttccgcagcaccagagtcaataactctttcacaacctccgatgtacctgctcccagaatagcctgaagtgctgcttttcctacgctctgcatataagcctttaaaccggataaaatccccactgccagtaatgccagtcccattacacttaacgcctcgatccctgtcaaacatagtagaaatccaactgtagcctcaaatacaactctatttgcatcccctcatatatccatgcacgagcacgacactacccttacctaaccagatcgtagctttccgctatcatccgctttacatctccatccggcacactgccgtcaaggatgaccgtattccagtgctttttgttctgatgataacccggaatgactgcttcgtacgctttccgccagaaatcaatccactccggatctgccttgacattaatccgcatctgtccctgatattcataagtccagagaaatgcccgcttatttttccgggaacgcaccagcacccagtttggatcgtgaaacggtgtgtccacatagacatccggaaatgacattccgtattccaatgcttcttctctcgttgtcatagctttttcttctacctccgccccagctctcgtatccgctcctctgccggcgcatagctgccgcacttccggtaataggcaagcgcctcttcctttttcccgaggcactcgtagatgacgccgatgttatagtccgcccgataggaattcactccctgtgcccggcactctgcatgcccggccgccttctcaaattcgcgcaccgcctctgtgaaccgtgcgtttttcatgtaaatcaatcccatcaggaactgaaaatccgcactttttccaaattcgtcatagatattctcaaaaaacagtgccgtctgctcctgcccgctgttgattaacgcatatccgtatgtctccaccatgtcaatcacgtattccagttcaggatttaggtcaaacgaaagcccctgcgcgaaccattcgcacgccacgccgtattctcccagcatgtaataactcttgccgagctgatacagaagataaggaatctgcccgcttccacgagcattcgcatctgttccggctgtctctgcctttgcgacgccgtcttttgccccggcattttcatcccagcccagctgctttaattcctgctccaacaagcggatgttgcgctttgccttttcttttttctgctgctcgggcagatcgtatccggtgtgcaagatcacaaccggcgtctcatacgtctggtaaccgctctctgcgccgtgcaggggcatcacctgctcatgaatccttccttcgtaatgaaaatattcttttgcgaatatgcggttgatccactcccggttctcctgttcctccccgtttctgtgaaacacattccgcctgcggatccggccgaccgcccccggatgcgcggcaatctgtttttccagtacggacagatccagctgctctgcaaactcgtcgctgtccaaaaccagtacataggaatgtgaggccttttctatcgcaaaattctttgccgccgaaaaatcgtcgcaccacgggaaatcatatagcctgtccgtataacgcgccgcaatctgtttcgtgcggtccgtcgatccggtatccaccacaatcgtctccaggccgtacggagcaagcgcctttaagcatcggtcgatattctgttcttcgttttttgtaatgatacagatggataggttcattgcagccttctcctgtctttatagcaaaaaggcatcctttcacagaatgccttttcctgtctttgccgttccggctattttaaaatctcaagtactgcctttgcatcatcattatactgtgccagaatactctgggatgcatgcaccagaatccggttggtcgaatacaataccatctccatattcatgttagtgtctctcttactcgactctgcgctctgtgtattctcagatgtattatctgtgttacgcaccgcatgctccagacgctcctgctgcgcaccgaatttatctctccagtgagatgccgtctcaatcgcatcctgcaccatcgtgatcgactccgacgccttttgatgagaagatacatccaccttatctacaccaaggctctccttgcttgcgttcacaaactgaatatcaatgctttgaccgtttaacgctcccgactgtatccgatagtatcccggtgccgcctgcggcgttccctccgccagtatgtactgctgattaaagttcgtcgtgtatgcgatacgatccacttcctgattcagctgatcaatctcatcctgaatcgatctgcggtctgcatccgtatgtgtatcattcgccgcctgggtagtcagttccaccatgcgtccaagcacatcctgtgtctcctgcagcgccgcatcagccgtctgcagcatactgatgccatcctgggaatttctggatgccttattcagtcctctcgtctgatgacgcatcgtctcagaaatctgcaatcctgccgcatcatcatttgccccgataatcttatatcctgtcgccagctttttagaagatacctccatcttcttaacattataacgcagctgtctgctctcacagatcgatgccatattgtgattaactaccatgttattctacctcttccctgagatgtttttcgatatatttctgatatttatatcgaatcgttttgcatatttctttagaagaattattctacttgtccaaaaaaatacaacctatttcaaatttttacaccagcagatactcatattattaaaatccaaaaaattctctaaaatatcttcttcatttaaatataattcgtcacactccagcacctaacagacacccattttcttacttacactctgtttttctttattacccagtaatagcttgttgtttccttacggttttcctgttgctgttgccacgtcgttccactaaactgtacttcatatttttctgttggaaaatagactttaaacagttcttcatactcttgtaacgctctgtaaattgcattgtagcaacttcctaattcagaggaataaaaatcttttaaagtaaatcgttttgatacacccacagattccttaatataaattttcccatgctgtgccaataatgcatctacactttttaaacactcacctatctcttcatcatttatatacattaacacaccgttgataaaaattctgtcataagcacgcttccatccatgttcatccagcacctgctcaacattttgaaatgttccctgcgcaaaaaaacactttcctgaatctgcaagattctgctccgcgatttgcaaaaactccttactataatcaatccctatatattttcctgtctttaatatctttactatctcatctccccatcgccctacaccgcagccaatatctaatacgctattttctgattgaatatcaagcatttccttcatatgttgcttctcatacttatcccgttctaatgccagttcaggattattgtcttgataaattacataattatatcgatgtggtagttttttatccgttctactctcgaaaaactccttcgtacgctcattgtctatatgtacacttgttcctgccacacgttcacccgcaaaaatttccttcaatgcagctaccagcatttcattttcttcttcgcgcctaattgccagttttatgtattgtttcttactctctacccgatccgttaagtcttttatcaaaatatcgtactttattaaaagcaccttcgttaattcatgcgccctccagcctccacatacttcacacatgatataatttgcctgtgaaggaatcactcgaagtccttctatttctgctaactgtgcctgaaattttcgccttgctatttttaccttttcaagcgcctccgtatagttttttctatatttttcttctatttgaagataaaattctgcaacagaatttatattccaaatggtcatatccttttttaattcatctattttttctatattcccagaaattgcacaccccagtcttagaccagataccccttgcgccacagaaagatttctcagtatcaataatctctgatatctttcatactcgttgtcaaaaagcatactggcatcccgttcatccgaaaagtcacagtagctttcatccaataataagtcaatatttttattctcacaccattgaataatgcatctcatatctgctttcggaatataattgccagaatgataatctggattaaccaatattaacatcgatatattctgttctccaaaatataacattatatcctttgccgaatacgataaatcatcattctcaggaacatatatttccatattgtcagctttgtatcgattgatatattcttcgtttgtcggtttaacaacaccaatttttccttcagccttcgtcatgactatgtttataatttcttccactccatttgcaacacttacatttttctgtccaacgccaaggttttttgctaccaacaatgcattgatgtccattcccgacggatacgcagttaccaaattatccaaattggctttcagctcatccagtaaacgcttcggtggaaaataaggatttgtcgggcagcaaaaatcctttaatttaggatatctccaatatcctccccatctctgttgcactctgaaaagtctttcatcatcatcattgacaaatatagatgatgcaatatctaagtcctgaatatcatctatctcataccatttttttccgttgatacgctttgcacgaattacaggtgtgtccagcagcgtaattacacgtaatacctgttcataatattcattatttcctaatgcctttgtatatgcttccagaaaagggacataatataagttagaaaaatcttttgcaaacttataaatatttactgttttataataatatggaatatcttcaaaaataaattttttcccaggaataaattcctgtatatgatcttgatcatcaatttttataactgtcccatccatccagctctcatatttatcaacaagagcaagtgtatctctttcgtcctcaacaagttctttcaacacatcatcttcaaatatcaaatcggactctaataaaattgtatcttccatacacaaatattcttttgcaagcgaaagcgaatatatattattcgtcttataatatacaggattatcaataaacgtaataggagtatctatcttcaatccaccgatataatttatcaatttctttccttcatagccaactacaattactactttagataaattcagcttatctaactgcttcagcattctctcaataagcgtaacaccatttacctttaccatacattttgtattatcccttgttagttcctttaatcttttccccatacccgctgccagaataattgcctgcatactctcatctccctttcttctcttgaattaaatgatatttccacattagaaacatttttttatttgctcgaatatgttttccgcagcacttttttcataaatattcctgtaatcaaaatttttcacaaaaaattcttctcgcagctctctcttattatctttccccccaagaactacttcctgcaaaaatctttcaatcgcctcctcatcctttccatctgctacataatgaacttttattaacctgtcaccaacatcattgtacctttgttcttttctcattagctgtaataggggcttgtgtacatacaggtattctgccaaaaacgaaacgctatctaaaatcatagcatccgaattcacaaacaattcgtcatacattccctcgtcaattacatccgcattctgtaaatttcgccattggttttcatattccttccactcattcatatctttaaatattcctgcttgtattgccttatattttaaatgtggatgcggtttaaaaacccaaaccgtatcattaccatatttcttcgccagacttagcattatctgataattgtctgcaaatgttgaaaacacaattatgtcatcttctgataccgtatgatgtggtgcatatataattttcttcgccgtcgggtttccagctttccttctaagtgcatcccagattatatccgcatgtgtttgatatagtccatccattttgggacttcccgtataaacagcattactacttcccacaaacgtatatttttctgccatttctactgcacactggctatcctcaaaaatcttccatgcaacattatgaattaacttattatactgatcaaatacatatctgcccgttttatcctgtgccagcataaatccataaggtacatacatatgaagaacatctaacgggtaattcaataaatgatactgctcacgaaataattctgtccacgaagtcaaccatatacacaaatccggttttactcctacttcctcccaggtatactgtctcccggtgtccaaatccaatgtctgtactacctgcaaatttttcttctgttgaaaatactctaaattctctttatattcagaaatcatctcgtccttttgcacattatgatttgatatcaagtatacataaggtacaaatctatttgactgcttgaacagttcaaacagttcgtctccaatccacgaagacgaatagttcgcaataaatcctactataatcttttccttcttttttagtctatgaatatttatattctccaaatagttttttatatgcaaatacaaatttttaccatctgacatacaacgcgtcacttcaaacagcgcatttaaataccagcagttaaacattcctattgtattttcgtttaacatgcctgtgtctattgcatcaagtaacaaattcgccatttgcatattttgttcttcattcatgatactcttctcctagtttttttgtatatgttctatttatcccaaattgtgttccaaatccttctttaaactgagcaaggctcttatttaaaattctcccctgttcttcagtgctgattccaaatgaaaaaaaacgatagccagatctcattgcaaggcttatcaattccccatccagataattcatagtataaaattttagataaatcggatctgctgcaagatattgtgtatgaaaaactctgttttcaaacttaaaaaccatactacccgccaccattttttcccccatataaacagcatagaattctacaatatccctaagccgctgatttttaaagtccacaagttctgagcaggaatgaactggttgtgtttcatacttttctaggttaaggcataataactgataaaattccattatttcttcgtctttttcaatttttctgaatgtcaaatcattttttaatgcatatttataatctcttcttctgccggccgaaaaattgctaataacgtcttccctatattcctcaaaatccacataactgctcaattcatcatacggtatatatccatacttatataaaaaataatccagcaattctatatttctttttgcaaatattgtgcttgtctgtcgcagttttacctcatcatacccctgttctctccaatacacttccaatacctgcatgatagcatctacatgttcaatattataaaacgccttaccaataacaataccaccaaatgtacttcctgcatgcgaataaaatacctttttatcccttatctcaatcaagcatgccggcacaacagcgactattgttccttgccccttatatatcgcaaaagaagtatctttaaacttatttccatgataattcaaaaaatttcttgtttgtaaaaaagttccattgcacgactgatattgcacgaactcatcccatttttcctgcatatcatctgtatacttctttatttctaaattaagcatatatttgccctcttatcctctatttcgtatacctatagtttacatatatttctgatccatactcaggcaaatatgctgtcagtttatatagtgcttccagaatgttctcatcaataattccctgctctacgcattttagcatctgcgcatgcgagaatggctttacaaaataacttcccttttcgcatatttcaactcttccagttttccctatcaactgctccaaagactccatgtcaaatactctattttgctgaagtatcctattacgctctgtcagtttctttaactctggtattatccccgcttcatacgctaaaattctatgaattgaacatgcattgggaacatttatgtgtaccacagtttgtgttgtactgaccgctctgactgcatttaataaccgctctggatcgtccacctcatgtaacaaaccactaactataatcaagtcatatgccgattgagatatctcatcaattttatcctcaaaatagccataaacatatgtaattttctttctcccgtgcaatactttctttgcattttcaaggaactctttcccttgttcaacaatagtatactcatcaaactcttcaacataagcggcaagtggatccataccgcatccaatttctagaatctttctataccctccccgctgtattatgtccaaaagtttttttcgccgaaatggtacctgatattttgactcaaaatcattttttatatattctttttgatattgctctatgtctctcatcccttgttcatcctttccccggatactgattcacacatttgcaaacccactgaatctcatcttcggtcatccccggatataacggcaggctgacttcctctgtgcagattcgctttgtcactggataccgctgcatctgtccgcgaaattcctgatatgcctgctgctccataatcggtgttggatagtgaatgttcgttgctattccacgtctctttaaatgttccacaaacgcttcccgctcttttacaagaaccggatagatatgaaatacgtgttccttctcattctccggtatttgcggcaacacaactttctcatttgtaatctgcccgctgtaaattttagcaattttacgccgctcctcattccacgcatccagatgcggcaattttaccgaaaggaatgctgcctgcagttcatccagtctggaattgcagcccttgtatacatggcaatatttctggtaggagccatagtttccataagctcgcacctttttcgcaagttcctcatcatccgtcacaactgcacccgcatctccaagagcccccagatttttacccggatagaagctgaatgccgccgcatcccctatctttccggctttcacaccgctcactgctgctccatgtgcctgagccgcatcctcaatgattttcatatcatactgctttgcaagatcacggatcggcgttacatccaccgcccgcccatacagatgtaccacaataatagctttggttctggcagttattttctcctcaactttcgccaggtcaatcgtgtaagtctgtacatcggcatctacgaacaccggctttgctccaacatatgtaatggccagcaccgtcgcaataaaagtattggcaggaacgatcacctcatccccttccccaattccatatgccagcaagatcagacggatcgcatccagtccgtttccggttcccacacatgcccttgccccgcaatacgctgcaaattcctgctcaaatctgtgatccgcttctccgcctataaaccactgccgatccagcacttcccggtaagcttgatccagttcttcctttatattctcatgaatccgtccaagattcagatatggtatctcatgcatgttctaatccctcttttaccatttttaaaaatgtgtcataatcgcgaatataatcctcttcccggtatacctccgatgcaagcaccatcaatacggcatccggcgaaaaatcgtacatctctctccacatattattcggaacgtacagtccctcatatggtttttccagagacacaatcttcttctctctcccgttatccagacgaatcttacaggaaccatggatgcagatcaatatctgtttcagggatttatgcgcatggtacccgcgggtaactccctccttggtatcatacatataataaacacgcttgatctcgaacggaatatcattatactcttccaatgccaccagcattccacgatcatcaccatgctgttgaaatgcgtattttacgatttgcatagtttttcctccaaatgttctattcgcttctcatattcagtaagtttcgtgtttttgttttttatcacatccatagccgaatcatcaaagagcatcggtctggtattcatttcgtaaaaatcttttaatccaactccatattcttcctcaagaatatttctacattcttcatcctccagcagtctggcaaacatgtcctccgcgaaacaatttccaccctcccacagccagagagctttttcgcacaggacttctttctcctgtgcagccgttggattttttagcttcccattgaaaatcgtcaggaactcctgtgccgacatatcatttacatagctataatgaatccactgccgctcatgagcatctcttatccgggttctggcattatcctcgctgacatttttccctttctcaaagaaccgtctgtaacgtgtaagcttttcctgaaaaatatgtacttcacctgtctttaaaagtcgcagccacaaatcataatcctgcagctgaaccagcgcatatcggtagtaaccgctctcccgcagtgcctctctccggatacatacacttggcgcacagaaaaaattgttgctctcaagaaggttcctgatccatatttttgccggataattaccagaacagaacctttgatagatatccctattctcgctatttctgttgcatccgtcttcatcgatgatatccgcccatgaaaaacacagattgtacgctggatgttcttccagaaatgtgacctgtttttctatcttatcctttccccagatatcatcatgccctataagtgccacatacttcccctgagccaactcaaacccttcgtttccagcataacagacatgacggtttttttccagaaaaacaggtctgattctctcatccttgtatgccagaattttctccctgctgccatccacagaggcgtcatctatcacaataatttccatattgtggtacgtctgatttaaaacactttccaatgcctgaccaacaatattttcgctattatacacacacataacaacgcttaccagtggctcttctttccttttatcgaacagacagtcctgtgcatcattagatctccccatacatacggtttccaccttgcggatcgcatcacgggaaatacgtccttcttttacgcggctctttaactcctcaattcggtcatcctgccttttatacccaatacgaaggattacaaaacgcagccatctgtaatactcctccagcttctccctgtcgtcgcatacaaaccattcactgtgcgcctgtgcaatactggcattttccagtctgtaaatttccgccagatccatgatctcctgtatcgcaatattttctacctttttatcctgcagattctccgcaatatcatttaattccgaaaatttttgcttctgtaataagcctcttaattctgctgctatatcccgatatgcttcctcttttgcgaaagatttttcgctgcttttccaacctccgtcatgatagcaccacggtattttctgatacggaactacgatctcatatccggcttttctcatattcaagctttgcattatattataattgttccaaccgtcatccatctcctgccacggaatatcatattgcgtggccagcagatattttccagccacttttaccggcatccacttttgcattgcgtcctgctttaatctctccatatcctgtgcaagctgcgggttataaaatgccatattgccgatatcccagtggatgggatctgacagctccgttgcccccactactccgatcataccgatccgactgttctcaaaaatatccagaatatcatagatataattacggtttgtaataaacgtgtcctgatggagatatactttatattttgcgtctgaagcctcacatcctccattatagccttctgccatggaatcggcttcctgaatgcacataatatctacagtataggtatctggcacacataattcttgaatatatctcacacactcttcataataccaaaggtcatttacacatatgataaaagcaatttttttttcatccattttctatacttccctgcccttacgttatgcctggcgattcaatgcataaaaatcatttagcgtaaactgatacttctgctccagaatctctctgcactctgcattttcaagcatatctataaaatatggtgcagccagtgagcctcccacgttccacagtaaaaatgccttttcacacagtaccgcctcatgtgacatcgcttctttccaacgcagttcctcagagaaaacctccagaaattttgaatctgacatctgctcaattgcatttgaaataatccaccagcattcatgctgcaggcgattttcttttcctttatcacctgtaagatccgataaattcattccttttctgctgaactgccgataccatgtcagtttctcctgcagtacataaaccgatgtataattcaatattctaagccaaaggtcaaaatcctgcagctgaaccaacccgtaccggtaatatcccgtcttatctaacactgaccgcctgatacatgcgctaggtgcacatgcccaattcgatttatttaatatcattcagcgcagccagttttctgcggtatagttatccgcattcatcatatgataaagctgttcatattccttgctgatcgtcactccattctccccaagcacttctatccaagtaaaacatatacctacatctggatgttcttccaagaatgtgatctgcttctcgatcttatcctctctccaaatatcatcatgcccaatcaccgccacatacttcccatttgcatttgcaaacgcctggttacctgccacacatacattggaattttgatccatcagaatcgttcggacacgtctgtcttttttctgatacttttctatgatttgtctgctgccatccttagagcagtcatctacaatgataacctctatattggaataggtttgatttaaaacactctctattgtttcggcaacaaatttttcgccgttataaactgacattacaacacttaccaacggcatctctttcttctctttccaaaaacaaccaaaaacatctgatgtgtcattcgaggatatgttagctgttttccgaatagcgtccttgctgatctcacctgcggcaaccgctttctccaactccgaaatgcgactgtccgctcttccgtatgccatcctcagcaacgtccaccgcatattccgatagctttgatacatttctttccattgattcatttcaaaccatttgcaatgtaccttctctgtactcatcttttctaaggaatatatttctattaaattcataacttcctgtacctgcatatccggcagccaattatatctctgccgctccagcagcttaccgagatcatgatacaaatgtatttccacataccgggtcagaagttccctcatctgttccgccatcctgccgttttcccggtatttttccacttctccgcccattctcctcgtcgggaaatattccggatacaatttttgcatctgactatggtctttttcataatcttctgcatttataattgcattatcacggtagcaccacgcgttttcctgatatggaacaacaacttcatacccttgctttttcatctcaacggattgactcacactgtaaaagctccatcccgtcagctcctcccgccatgagacgtcatactgtgtagcgatcagcgtaccttctagcgcctctactttttcatatgtcgccgatgtttgtcgtaactcaaaatgatcttttatacatcttccatcataagccattatgctgccgatgttccacttcaaaaagtccccattatctaaaagtacatccgttcctgccactccaagcattccaatccggtcatttttctgaaaaatatccaaaatatccgctataaagtttctgtttaacagaaatgtgtcttcacgcaaataaaccttatactttgcgtcactttcctgcattgcctcattgtatcccttagtcattccctctgcttcaaaaactgtcaaaacatctatacggtatccatccggtatgatgagatctgaaatatacctcatacattcttcacagcaaatactttcacttacacatacgataaaatctatttttctctcatccatcccggcttctctctttcctaatctatcttgcaaaataccgtttattcttctttattcataacataaaaatcattaggggtaaaatgatactctttttcaaggacatcacgacactttgcattttccagaagattgataaaataactctccgcccgcgaacctcccaaattccacagcagaaatgccttctcgcaaagaacctcctcgtgggaagaagcttctttccacctcagttcatcagcaaatgtctgtaaaaatttttcatccgtcattttttcaaccgtatgaaaaacgctccaccacatctcatgcatcagacggtttaccgttccctctgttgccggcaaattcgacaaatttttaccctgctctgtaaaacgtcgataccacgtcagcttttcctgcaaaatatagatagaggaatcgcataaaacacgaagccacaattcataatcctgcaactgtaccagtccgtaacgataataacccacgcgttccaacaccgtttttcgtatgcacacactgggcgcacaagcccaattcgctttgtccagaatcatctggcacagccagttctccgcgctgttattgtcagcattcatggcatgatatatcagacgattttttttgcttacgattgtctgattttcatcaattacctctccccaggtaaaacatgccccggtatccggatgttcctccagaaaagccacctgtttttccaatttgtccggacgccacacatcatcatggccaatgatcgctacatacgttcccttcgctctctcaaatccggcattgcctgctgcacacacgtttgagtttctttccataaaaaccggtttcactctgttgtcttttttctgccaggatgtgataacgtccctgctgttatccgtcgaacagtcatctaccaccaaaaactctatattggtataggtttgatttaaaacactttccaatgtctcttgtaaaaaatcgcccgcattatagaccggcacacacacgcttacaagcggctgctctttcttttccgtccaaaaataccgaaaaattcccgtcgtatcaggcaaagatacgtttgctattttccggatcgcatctttgctgatttcaccggcatccaccatacgtttcagttccggaatccgttcatccgatcttccgtagcccagacgcaacaccgtccatcggactgtctgataagaaacatatatctttgaccagttttgcagtgcaaaccagttactgtgtttctttgaaacactcgcctcctccagaaaatagatttccatcatattcgctatttcctgtgcctgcatatctggcatccagttaaatctctgttttcctaatgcagcccgtgcctcatcgtataaatgcatctccatcagccacaccagcgcctgcctcatctcaatagccatttcctgttctttttggtgttgttcacgctcttgtctgatttcttttacagagaatatctccggataaatccgcatcaatccttcacggcaaatatcataatccctgctgttcaaaatgctgttatcacaatagcaccatggctgttcctgcctcggaaccacaacctcatatccctgccgtctcatttctatcgactggcttacgccatataaattccaaccctcagtcagatccccccgccacggtatatcatactgcgtgaccatcagcacaccatccacagctgcaacactctcatactttgccgcgggctgtcgaagttcaaatgtgtctttcaagcatcttccatcgtattcccggatattcccgacattccatgctgcattacagtctgcgttttccggaagcttatctgttccgcgtacgccaagcattccgatctgccggttattctctaaaatatccaatacatctgcgataaaatatttatttaacaggaagacatcttcacgcagatatactttgtactttgcatcactcgcctgcatcgcctcattatatccctctgctgttgatgccacatcaacaacggataatacgtccgtgcaatagccttccggcacggtaagatcttccagatattttacacactcctcgtaataccgcttgtctgttctacatataataaacgctatttttctatcatccataatctttcgctttcatactttaagtccgctattcgtttcacagcaatttctttatattcggaatataatccgctctgccatttactcgaaatgcattttccatgattatctgggcatcgtccaaagctaactgttcaaacaacttttgaaatttctgaaatgcatcaatcgaatcctgcattccataacgatcagtcacttcttcaaacgagcaaaaccgtcctagctgtggatatgaaaaatacaatacaattagtgcatgatataaaataaatttcgccggcacagcttctagcacccattcctgatcaaaccataacaattccccatcacaataaaacgcatttctgaaattcatatccaaaaaacctaattttaatattggaccatataaattttcgttttcctctatacctatatccagtgtatataatatattatccttccatgcaatttgttcagaagaatgcagtatctcctcatataataaatccatcagtctataaatttcactgacattcctctcttctgatgctttgagaataacatcctccaaaaggggcttatggacataatcacaggttaatattccattttcagcagtgtattccactatattcattccgtttttgctgaaaatgctctgactcttcagcatctgccgcatgtggttctgctcacacacttttgataatggttttttctcgacagtatgctcccttgtaaagcgtgtcagtatgcgatactgctcctttcgctcatcaggcagtttcgcatatgtcactttccccaaatcaccgcagtctgagcactctaccaaaaatgaatttgcaaaaaattcaaatactccattctccacaatatccgcataaagactcttctcatctgcaaccactgtactctttcctgcagaataattcactctcatgttctctacattctctgcatcctgccggctgggcaaaacatcctgcgaatatataatcacaggcaatttataatccggtaacggatagtaaaaatatgtgtgtgcaaatccactttcttttatcaacgtctccagtgacttctttgaaaacgttcttactcctttatccacatctctatattgattaatgctctcaaacggtattccaacatgatcctctggcgtcccacaccagtattttaaaccatactgattctctattgcgatcagcaatttgccatccggcttcaacaacctcttaatatttatcagaaaatccctgtagggattcggtgtctccgtataagagtcctgatactccaggacgcctatcagcgtaatatagtcaaatttcttgtcaaagacgatatcattcaaatttccaactataatctcaagattctctttttcgcggcagcgtaaaagtgtcgcggtcgcacgttttcttgaaagttctactgctgtgacatctctgcattcatcgcagagcacacctgtaatcgcccccattccacagccaatttcgagtacactgctgtctggtttaaatttataccagttcacaatattttttcttacaggcgacaagtggtaatatgtagaccagttaaaattctgaaaaacagcctccccatagtcctccggtttgttttcggcaatgatcttaataataagatcctcaatctctccctccgaatagaaatcttcattcttgtacgattttaaattaaattgaggcttcggatttaaatttgcaattaagtcctcgtacatttctcttcctccccaacatattgtttttccactcatccgaatacattatacacaaccattcaccaatacttttaaacaaaaattctacgcatgtgtatcactcattttctgcataagctgctgcactccgtaacgtatttcctcttgatttctccgattattctccacccggtacaattccatctgtctaggaatcatcgctgcatagggggattcctgatagtctgccacctctgccctcacggtatcccgcagcgtctcatacatggaatacggcacttcaaatccgcgctgcaccgcaaacagcagcgtctcatagaaatacgtatgcagaaaatatagcttgatctcctcataatactcccggaaaaacggcgtctgcttcataaaatgccacacggcaagctgcacatctgcatgcatctgcagcgttgtcatctgacgcatatcccggcgcatggttcccacctcattctggcggtagcagtaaaaagcttccgccatgatttcaaagcggcttccgtagaacaacagcggatacacaaacagcggttcttcataaatgacatgctctgcataacggacgcccgcccgctccacaagcgatctccggtacagcttgttccaacatccgtaagtgatcttctcgctgacaaggaaccgcttccgctcctcctttgtctgaatccggatactctcctccacagtctttctgcctgatgccactttcccgagcctttccgtataatacacataatcaaactgtacaatatccgcatcacgctctatggcgcgccgatatactttctcaaaaaaatccccctccacaaaatcatccgcatcgacaaacgccagatactctcccgttgcatagccgagcgccacattccgggcacccccttggcgtagattatcttccagatgaataatcatgatactttcgggatacgcacgttcaaattcttccagtagagcccatgtctcgcctgcatcatccgatgcgtcatccacaaagatcagttccagtgcgtccattccaatcgactgctgcaccagtgacaaaaaacactgcggaagccattttgccgcattatgacaggggacaattacacttactatcttcatgtgttttctaaatatccttcctgcttgtaaattttcctattttgtcagccgcttcaccgtttcaatgaccgtatcctgctgctcgtcggtaagccccggataaaccggaaggctgatgatgtgcgagtagacttcctccgccaccggacaatgcacttctttgaaaccgtgctcctggtagtacggatgatagtacaccggaatataatggacattcactgcgatgccgttctcccgaagctgctcaaacacggtctttctgtcgtggttcttcacctgtatgatatagagatgccatccgctgttcgtctccggcagctgatacggcgtcacaatattcgcgcagtccgcaaacgcctcatcgtagcgctttgtgatctcccttctgcgcgcaaggaagcggtccagcttccgcatctggctgcagccgagcgcacactggatatccgtcatgcggtaattatagccgagatcgagctgctgatagaaccacggtccctcatttctcgtcatcaggtctggatctctggtaattccgtggctgcggaacagcactaatttccggtacaattcctcactgtccgtcacaatcataccgccctcgcctgtcgtgatcggcttcaccggatgaaagctgaatgtcgtcatatccgacatggagccgatgcgccgtcccttatattccgagccgagcgcatgcgccgcatcctcgatcacgatcagatgatgctcctttgcgatcgcatgaatggcatccatatcgcagggctgtcctgccaaatgcaccggaataatcgctttggtcttatccgtgatcttgcgccggatgtcctccggatcaatgttgtacgtctgcggatcgatgtctgcaaaaaccggcgttccgccgcagtacagcacacagttggcggatgccgcaaacgtgatcggcgtggtgattacctcatcccccggtccgattcccgccgcatgacatgccgcatgcagtgccgcagtatcgtttgaaatggcgaccgcatatttcgcgcccacatactctgccactgcccgctcgaactctgccaccttcggtcctgtcgtcaggaaatccgatttcagcacctttactacttcctcaatatcatcttcctctatcgtctgtcttccgtatggtatcatcactgttcctccttgctgtacttttccagttccatctttgccctcttactataggaatacggaatgcccctgttttccttctgcatccgcctgtgaaaggatctaagccgctctgcgctcttttgatccggcatatgccatgtctccagctgtccgagaaccttctccttatccagtacgccatgtaagatcaggatgagaatggcgtctactgatatgttaccgctttctaccgcgtgaatcaattcctgataatcctgtgccggtctgtcaaactccatgcgatgcagcaaaaagcgtaccgagagataggtccggcatatcgcttcacagctgcccgcctgtgccagaaacgacgatcttttgcttaccctgcgatccgtctgctcaatctcacagataatcgcaagcatctccagctcggagctcttcatctggctctgatgatagatcccgatggcctgactggcctcgtcccattgcccctggtctatcatcctgcggatcgccgctgccagctgaccgctcagctgatcccactctccgctcgagaacagctcctccccctccggaacgttgaaaaattccggatactcttccatacagattttccggttcttgtcataattggtgagctttgcgaatccgcagtcgtgcaccacccagggttcttcctgataaggcaccacaatctcatagcctgccctgcggaattcaaacgcctgcgacacatcatagaaatcaaaatccgaaaacagatcctctctccacggcaaatcatactgcgtcatcatcagcagcccgtccaccgcatcgacggtctgatccttggtctggttcggcccgcacagcaggacataggaaagatccggctccctgcagtccacttttcccacattccaggaagaatagacgacgccgttctccggaatgccgattcctccagccatcccgatcatccccgtctttgggtgctccttaaaaatacgcagcgtcttctccaggaaacggctgtcgcggataaaaacatcctgatgcatatagactttatattttgcatcgctacttcgcatccccagattgtacgccgcgcacatggaatccgcctcccagatgccgatcacatctatgtcatatcccgccgaaacttccagatgctctatgtaatacctgcactcttcaaaatacagctcattattcacgcatataatgaatgcgattgtgtcttttctgtcctctaccggcatgattttctacctcatacatctcttttatactgctgcaaaaatgccgcaatccgctctgcgccttttccgtccaccagccttctcatccgctcaaagctcagcgccctcttcccggcgtctttcgtatagcagaccagcttttcgcagattgcatgcggcgcatcgtccttttctctcacatcccccgcatagattaacaggttgtgttctgccatctcttccgcaaattccagctgattatccgcaaatgcaaagcagaccgtcggaatcccgcaggcgcacagttccagaagtgttgtgccgcccgccgagaccgccgcctcgcactgctgcatgtagcgccacatatcgggaatattcttgtgaagtatgatcttcgggttctctgccgccagttcacgcagcatatcctcattccgattcatactgccgacaatcacatgccacagatactcctgcaattcctgcatctgtgtgccgtacgcaagaattctgcccgccatattgtaaggatctgtcccgccggtcgagagcagaatactcttctcccgcggcttatcaaaggaaagatgtgaaaactcctcccggagcggcgcatataaaagtccggtaaggtactgtaccccgtccttttcatgcagcccctccggcgtcttctgtctctccctgcacggtatgtattgaagcagcgccgacacctcgtagtgttcctttctgaaatcatcaacatagaataccggcactatccggtttaattctgccagatagcgcaccgtcgcacagtaggaatccactaccagccagtccacctgctgtgcctgtaaccgctgcttcatgaccggaagctcatcctccagcgcatcccagcgcgtctctagaatccgatagggaaatcccgcctttgcgatccgctccgtctctttttcctctgccagccagaactcacacgtcagcccgcacttcctgcacgccgacgcgatcgaaagcgttcgcatcagatgtccggttgccacctgctcgttcgcatccacccgaaatacaatcatctgtctactccacctcacccggaagaatcggctctccgaagcggtacgcctttttcgccttgcgccccagcagcgtgcggtaatacttcggcttgataccgatggcaggccggatgctgcgcacattctccccggtgaaagcttccccctccgcaatcggttttaccgcaaccagcgatctgcggtattttaaactgctcttctcatgttcggtcagttcataggtcgcctttcccttaatcacgcaggcattccgcacatcctgcaccatctgcgcaaattcgccgatctccatggaaaatgctgcatccgggttgtcaatcgtccgatccaggcagacatgcttttcgatgacctgcgctcccagtgacactgccacaacatccgcaagcgatcccattgagtgatccgacaatcccaccggcacgccgaaccgctccttcatatccgcgatcgttgccacattcatatcctcatactgcgccggatactggctgcagcatttcagcagcaccacctgctcgtttccctgcctccggcacgcctcaagcgcctccctgatctcttcctccgacgccattccgcaggacataatcatcggcttacctttactcgccgtgtactcgatcaacggaatatccaccagctcaaaggacgcgattttgtagaactccacatccagatcctccaggaaatcgaccgccgtccggtcaaacggcgtagacaaaaaatccacaccggcctccctgcacttatcccgcagcgcccgctgccattcccacggggtataggccgcctggtagagctgataataattatagccgtcccacagaccgcccttgatctgatacggttcctccctgcagtcaatcgtgagcgtatccgccgtgtaggtctgtatcttcacacaatccgcaccggcttttgccgcctcctcaatgattttgaatgcattctcaatttttcctgcatggtttgcggacatctctgcaatcacatagaccccgctgttcattttctcatatagtttcatctgtgacagccgcctcccttttctatacagactttcaacatctcgtaaatatcctgccgctgcttcgattcctcgtactccacattatttctcaataataattctgcaccaatcaggtgacggttttctttcctctcaaacagtgtctttaactgctccccgtccgctcttgaaatccatgttttccatacgatctcaccgttttcatcctgctgcatcgccagatgaacaaatctgctcatccaccggctgttttcgtctatcgtttttataacgacctgttgttttctcaagctccagtaggcaactccggcagcccccagcagatattccgcatagctttccctgccagcccagtacatcatctctgccatggcatcatttgagatcatctcctcaaccctgagaaagcgttctgcgaatccgcgttctatcggattcatataacggtctgtaaggggttcacccagcacaatactctggcagatcgccaccagattatccagcactctgcccgccacataagaaagtgtctcctgttttccttcggtattctccggcagcacctgtcttatgcttttccattgccgttcggtatcatagtcgaagcacacccttgtcgccgtctgcgatgtattggtggtaagaacatattccatacgatccataacgaccattttcccggctcttgcaatcgcctctgtcattccctcacaatcaccataatatggttcataaaagtcaataccatactgcttcaaaaaatcgattcgcacataatgcattaccgaattatagtacaccttctgcatcagttctgcaaaaatctgcagcttatcttcctgctcataaatgcagtatgggggaattttctgctccgcaatcctgtacgtcccatcgtcccacactgcaaatccgcagcctgtccatacaatatccggatgattctttcgaatctcgtctgttacttcctgcagcgtttcgtctgatgccagataatcgtccgctcccagaaacatcatatattgccctgatgctttctcaaggcacaggctgattcccttgcgccatcctacattagaatctcgatagatcacgtgaatccgttcatctattctctcatattcctgcaaaacagtaatggtttcgtccttactgccattatcaagaatcaccagttcccagttctgacatgtttgatgtcttgcagaatccaatgcatttcccaatgtcattgacgaatgataggtacacatcaatatactgtacaaaggtatctgttttgtgtaagaaaatccatacttctccggtttttgccgatatcccagagatcgaaatattttttgcgaagcggtattttctctttttacctctgcatacagttcgttgcagaacccgtcttctctgagtctgttctccaattctgagagcatccagcgcgaaagtcccctgcctcttgcctccctgcacagagcataagaaatctctgcagtccgctcctgcctgtcagcccggacctgtccgattgcctgtccgtttctctctaaaatatagataactgtattgaaatcctgcaatttttgtgcaaaccagttctcatgactgctgtatggaatttccgacgtctgaaaagaatttttgcgaacttcatcttcatttcttaatcgaaacaagaatcggcaatcagaccagcaagcctttctcaaatttaattcctgtgcttcttccattcccgctttccaaaacctttcagtcacacatttttccatctgcgcatcttgcctgcagcagatattgatacgcgtaaaacatgctctcatcggacacttccgaaagttccatcaacttacttacgaattctctgtcttcctggctgacgccattgatcgtcatccgaatctccaccgcctccagtcctgtccgcattaacatacgcagaatttctttataggtaaaaaagtgaatatgtgtcctgtcgagcagtccctgatctgcataagtaaaattaccattgagcagatctcttactaccgatacatgcataatattcggaatcgatgccaggatacttcccccttttttcaaaaattctttacaatagttcaaggttccttccggatctctcaaatgctcgagaacatccccgaatatgatatagtcgaacgtaactccgccaaaatccatctggcgctcctcaatgtttcctaccgttacatttgcaatacactttgccactccagccaccgatgcattgatctccactccataaagcgcagcgttcggataatgatttctgacccagagcagattaaccccgcaatcacatccaatctcaagaacacggagcggcgtctcccgggattctgtgatataggaaagcaatcctgtatttggaattgcattaaaataattcatatcccacttttctttcaataaccgccgatcggacaatgcatgctgtttgttttccttccctttttgtttttctgcaatctggtaaaagaatgccgaaccacattcaaacagcttatacccaagctctattcccctgacacagtaatcccacatcacattttctgccagaaaaagcttctcctcaaatatccccactttctccagcatggatcgtttcagcatcacacagccatctgtcaatttcagctgttgcaaattcacttccgacgcaattttcccttcctgtatgtatgaaactgcctccgtatagttgccggcagtctcggagccattgtgtatcagcttcggcataactgcaccgatctccctgtcggcatacagcagtctctgcatctcctcaatggaatctggcagtatcatataacacggattaagcagcaatatgtcctccgctatctgaaattctgcctttgcatagtttacaatcgcactgtaactttcaccgccttcatcacagataagataattcattcccggccgctcttccagccactggcgcagcccatcctctgatccattgtctactataataagatcccgttcctctatcccggcaagcagccgaagtgcttctatctccatctgtaataattcaaactgattatatgcaacaataatgactttcattgcttctcctttttcattcgttctgtttcttttgttttaacccagaatccgtctcagcgcgttatcaaatgtaaagtctctccttaccttttcgaacccgcttatcgcaatcctttgccgctcctcttcatgctccagataaaattttgcttttgcatacatatcttccagattttcatagattacacattcctccccattgacgaaatgctcagcaatctcttcccggtagctggtgagaacaaacccaccgcaccccatgatatccagcacccggagcggaattcctgtctggattgcccgcagtgcaatgttaaggtttattttcgcattgtggaaaatgtacggcatctgcttataataatctgcatatccgttatgtgtcacgtgtgtcagcctttcatccttttcattcgaccacagcgcggttttaaaatgctgtgacaataatccaagtatcacaaaacgctctctgcctgttgtctcacatgccagcatatactccagttcccttctggtaacctgaaccttatcaccacttgcctttgcataggagcggttcagatccaacaaaagctcctccgtcaccagttccggtatcaggtagcctccatatactttcaactgcgcggcaataatgccctccagatagcctctctgatattccgtcagcggctgcagataatactggtattcggtctgataaagcttcccgacaagggcaatctctgtgttatattttctctgttcttccacgcttaccggtgtcatatatactgtacggaacacctcactgtcaacagcaagcggcaaatgtctcgcattgatcccctgtttctgataagtctctgcctgcatacggtcaaaaaaatagatcgtgttacatgaattatacagcgtctcatgctcccggatatgaatagggcaatcatagacccatgaaatatagggcacctgatgatcctcacatactctggaaatcagtggggaataattcacagaaagtactttctcatatttttcggaaatcagctttttctcaaaccggcagcagaactcctcatccttctcccaatccgtgaatgtataaaaaaatgtatcatacgctatttcaagcttttgcaatgcacgttccattccggcattcataaaagaatgccactgaaaatataagattctgcccatcctggcgttatgctcctttgttccttttctctggtatacaaaagccagcttctgactctccaaaagctggctttacggcaaatattatttaattacttcattgacagattcgcccagctgtttaaacacaggaattactctttgaaattcttctgccatcttcgcgtcatctttcgcactgatcgcttcgcttaatgccacaatatccgcattaaagctctccttgtccacgcgcacctttccatcattcaatacctgcatcgtgctgtttacaacctgtatctcccagttgatcgcatctatgatcccctttaaaaactggtctgtatcatccaggcgctctcctgataactcttttacaatgatctccatgttctttaccagacgaccattgaactcctctaacacctgtaatgcttctatctgctctgctctgttatcttccatgatctcatccgacaccgtttcccggtgcagccatcccggcttcctttctaaaattatgctaatatatatatcgactgattttctgtattacattagcactatttctatttttcatcttcctgctacatactacgaaagaaatcatttatctgttctgtaaccttttttgccccacatgcattcaagtgcgaccagtcataaaaatcctcatccgtaaacagttccggttttgctccaagatccaatagtgtcagatcatattccctgcaaaattgctgcataacggctttcgtcagctgtttcatttccttattaacattttctctaaaaacagacggaaacggcatctgcaaaagcactgtttttatccgattctgctgtaaaaatttaaaccatcgattcagaatccccatattttcctcataagtcgctggatacggcttattaaaaatatggtttatttcctctttatcctttattttctgctcctctgtggggcagtaacaacgcgtgtcctttttctcacaaatctcataaatatgcggatagcgcatcagaaaatccttttccaaaaaatctgtttgaaaaaaagtacggcacagttgtatctcttcttccatccgcattacatctttatggcgatccaaataatgtattttttttatctgaggataaaatcccaacattctcaggctttgtgttccgagtgacaagtcccaccaaagcctgtaatcattcatgccgatcacgcaatactctattttcctgttttgaatattcacaatttcgttataagcccacataaaacgataataatccgtataaatgtcctgagacggtcctgccaagcacatcaacctatgttccagactttcatattcaattcccttctgctcataactcatcccacacactacgccaattgcactttttacttccacccgtgtttttctgcagagcgtagccgtctccggactgatttcatttaaaagacgcataaaatcaaaccgaatcaatctggcttttccaaagcactcctgctcggtaaagtttttatatgcggagcagacaatcacaaaatcactattcccgcattcttcctttaatgcttctagccttccaagaacctgcaccttttcatagttcagaagttgttctaccgtactgcaatccctctccgatcccagcagccaaatttggaatttcgatattatattttcatttgatgcatatttgttctcacacctgtattcctgtacaaatttttccctctgatgccagtagttgcgcaggttggtatttccgcaatcatgaaggcaccacggacgctccatcgcaggaaccaccacctggtatccatgccttataaattcctggctttgtgacgcatcataaaaatcccagccatcgaacagatcctcccgccagggcagatcatactgcgttgccataagcattccgtcgatcatctcaaccggacaccactccccccgtacttcttccaatgtattgcgccgtgtggttcttacatccgtcatatatactttccctacgcagggagcataccacatcacaccgttctcaggaagttttctcgaaccaaccatcccaaacatcccgatcgagggatcctggaaaatatgcagcatcctttctataaaatccggttccagaatcatcacatcctgatgtaaatatactttataccgggcatctgaatttttcattgcctcgttgtatcctgcggtcatacttacagcgccctttacacactgccactcgacacaataaccgtcaggtattttcaaccgcctgatgtaccagaccgcctctgctgcatatgcatcatcattgacacacataacaaaacatatcttatgctcgtccatactccctctataaatatctctctaattctgttatcagttcccttatgtccgccacgtccggcatttgtttctgcagttcttttaaaagctcatacgcatataccagcatctgatgatcaaggaaaagatccgccagcggcgccaaaacatcactggtttcctcaaatgcggaacgaatcacaaaaagcagcgcaacagatgatatattctcttcctgaatcctgcggcaaagttcttcccccatttcgggaatacctgccgcctttacccgccagagcgaaaaacgcagattccggatgggctcccacaattcttctatattctgtgcctctgtgtccagtacggtatgccggacacctgcctgtacttccgcctcataaatctccaaaaggaacttcatctccaaaaaggagtcatttttctcaaatgtctgtataaatgccgcatcagagaacatgatttttaattcttcccagccttctcctgtatgcagacagatatttctgttcatcagctgcagatacttttcttctaacaccccatagcacttctgccactcctcttcaagtgtttcccgcttctgtgcatatgcttcacttccgatattttccgcttcccttgtcaatccttctgccgtttccacatttcctcctgaatccgatcccatactgcctgcggtctctccgtatacgcacaaagcaccgttttaatcgcaggtgtgctgtaagcttccagcttcctgtagatctcgccgtctgctgcatctttccggtattcgattcgctttaatatccgatgcagctcaagcagcttcccgcgaagctgttcccccgatgctccttccagccagaaccgctccattcccgcttcccgctctgccgccgcaatatccgccaacacctccagatctttcagatgaagccagccccggttctcctgctcctgaaacaattccagaaactgcgccttttctcctttgtccacaagctcgtacagttcctttctggcaatctccttgatctgctccagttcttttctgctctcggagtaatccatcgcctggaaggactgaatgtcctggtattccgtgatcattttgttacaatatttctgatagtttaacattctgctgtaaaaattatcatggtaacaccagggcgtctcttggcaaggcactacaacccgccagcccatccgcctcatctccagacactgcgacacatcatagaaatcccaaccatcaaacagatcttcccgccaacgaacatccctggatgtcgcaagcagcaatccatccaacgcttccacttccactggctgctctttatcctgctccagtgtgagcgttcccggaatacagttgtggtacaccataccgacatcccaatgtcctaccgcctgaccatttgccggcagttttctacagcccacgcagccaagcatgccaatcgccgcatcttcctcaaacacctttatcatatctctgataaaggtctgtgaaatgatccgtgtatcctgatgcagatatactttatatctggcctctgaactttgcatcgccgcattatatccggccgccatgctcaccgcttcccgcacccggatcacatctacctcgtaatgctccggaacatccagacaacgtatataaaactcggattcatccgcctgcctgtcatcatttacacacataataaacgcaatctgcctgtcgttcattctacctgcccctgtattccttctgaaactttttccgttcctcaaaataattctgaaaatcagatgctccacaatcatggatacaccatggctttttcattgccggcaccacaatctggtagcctctcttccggaactcaaatgcctgcgatatatcataaaaatcccacttccgaaacagatcttccctccatggaacatcatattgtgttgctattaaaagcccatctaccgcttccacctgctggtacggttccattacctcacctgccgtatacagttccatgtgatacgcactgctgctgtaaatgcaaccaatccgctccccataccacataatgctgttctccggcatttcaggcgaaccgatcatgccgatcattccgacttccttatctgcaaaaatatctaacagatgctggagaaaattttcttcaataatcatgacatcctgatgcagatatattttatactttgcctgggacgacatcattgcccgctggtatccctctgtcatgcatgctgcatcctcgatcacgcacatttccacgatatatccatccggtaccgtcaatttttctatatagtgcagtgcctcccgacaatactgcttattgtttgtacacatgataaatgcaaattttttttcgtccaccttcaccttcaccccgtcacatatgctttcagtccctctatcatctgcctgatactttcctctcccggtgccagcctctgcatcttcaaaagcagccagtaggtgtgtcgaaacatcttcgcttccaatgttaattccataatctcacacagcatcgagaattcatcagatgccattgtgtttaccgctttacagaggaacactggcgacacctgattctctttcagaaactgaatcagcttctcccctgcatctgcctctttggtaaattccagtctccacatcaggaaccggaatgcccgcatatatgcggtcagctctgtttctcccatccgtctgccttctatcttcctgtcaaagatggtatgggcttcccccatttccacttccgccttataaatgtccataataacgatcatctcgatcatggcattgcttctgttcccgtatggcgcaatctctttctcatctgcaaaaaaagcaagcagcttctcatgcgcctcgtctgttccctccatcagcatctgatcgatccatttcaggcgtgccttaagcgctgcgccatagcatgtttcccagcctttattggcgttttcctgttcccttgcaaattcctcgtttgtttctctgctctgcatattgtcctctgtaaaatttattgaaaaataaccgttcttatcttataatctctttaatctattatactgtatgctctgtctgcaggcaacctaagtcagctttcatcatacattttccgaaaggcttccattatctatgaatatactttatttaagctggacagaaaactctgcctcagacatgattgaaacacttcaacaactcggacacaatgtctgtgcccagctgcatgaattatccttctacttttcagatgcactgattcccagtctgcagcaggtgtttgccagccaatcctttgactgtatttttacctttaattttataccgccggtttccaatgttgcagaggcaatacagattccttatctctgctgggtatatgacggcccgcatgtgacgctgtattccaacagtctgcgcaaccgttgcaactacatttttctgtttgaccggaagatgcagcaggatgcattactgcacggcgcgcttcacgcttatcacctgccactcgccataaacgcagaccgtctggcaagccacctttccctatcaggttcccgcgatacgttctttccgacaacttatcgccatgaggtctcctttgttggttctctgtatgagaaaacgacttttgagcacctgaagaatgttccgccacacctgaaaggatatcttgacggcatcattgccgctcagaaacaggtctggggggcagatgtgatctcggcagcactttcacccgaccacgtaaacgaaatttatcaagcacttccctttacccgctctgctggggaatttatcactcccaaagatgtgtataccggcgttatccagaagcaggttacctcggaagagcggatctctctgctcaacgccatcaccaatgtcgctccggtagcactgtactcggcttcagatacatcgttatgccccaaggccgcgcccatgggaattgtatcttacacagcagaaatgccggatatctttcataccaccaagatcaatctcaatattactctccggtcgatcacgtccggtattccgcttcgcgccatcgatattctcggctgtggcggctttctgttaagcaactatcagccggagctctgtgaatattttacacccgatgtggacttcgtatattttgaggatccggatgatctggcagaaaaagtcacctactatctctcgcacgaaaaagaacgggaagatatcgcataccatggctaccagacggtcacgcagaatttttcctatcccgttcaggtatcccgcatgtttgaactttttacctccgctctctgagaatctgcaaaaactgcacagctcgcccgtcccaggtatgctcccgtgccgttttttctcttccatgttccgccatctgcagccggcgctcctcatctgcgagcagcgccgcaatctgctccggcagctgatccatattatccagatgataaatcaacatatcaccataatcataacgtccgcgcagatatgtggtgtcatccgtgaccagtaccgctcccgccagcataatatctgccattctctctgtaaatccgcccttatgccatgacattacattcaaggacatccgggactgtttgtagattgtcaggctctcctccaccgtgacatccggatgacagatcagattcgggtatctgcaaagcggtgacagcttccagctgtttccgaatacatccagccggatcccgctctttaagatcgtctccacaactctggcacgataataatgcatcacacaatatcccgtgacacaaagttctctaagatggttcaaaaattcctgatcggtcagcttcagtccctgatgttccactgccctggcaaatgcctgctctaacgtcagatccggctgctgcctcataatcagcagaaaacggtttgccagaaaacgcttcggacgctccagtccatgaatccacagcacctgtgaaaaataatctcccattgttcccacgaacgtaagcccatattggcgttccggcacctcagcagtttctgcttccattcctgcgggcggaaacagaagcgcttcttttccgaaatatcttctcgcaaaatcagcataattctgatccagtgtaagaatataaaaatccggataatggtgctgtaaatgcttttgcagccataccggatggtcaaatataaaattatactttggaccataaatatattcatgtacataatgcacttcatctgccattttcacagaaaacaggtaagactgcacgccgataaccgccttaaaatgccttccagtgaacttcagaatcccctcgacatcctcatcatttaaatcataataaatgacatgttctcctgcacgttccagtgctgcaccaaactgctccgcaaacacggtcagcacattatggcacaccgcatctcctttataaatcaatatcggctccgtttcctcatccagcacatagtagtcttctccgtgtgctaccatattttccagataaggcacgatccgctccttacatccctgcttctgcgcctgcgccagtacacccataatcgccatatcaaagcagcccgcctccttcagttcgccgctgtattttccgatcacatagcagtctgtccggcatccctgctccgtaaaatcatccgcttcttccgcaccgagtgttacatatccatccgaagatgtcccagcaggaatctcctccagaataattggcgattgctgtgcaattctaagaagcagttcatatttttgcttcgcccgcagtctctcattgattccccccgccgcgcgaaccagttcttccggtgccagaatttccccctcacagatcgtttcatccagcaaaatatccagaaagggaatcccctcctgtgcactttttaatctccgtaccattccgtttctcccatgtccattcttccgtctaataatgaatatatcggcatttcagattgtaatattaactttcctccatgcattcccgatatattaaaatatagacttccaacagaaaggatctcctcatgcattccgaaccgattcatcttgtcatagctatcaatcagaaatacattcgatatgcttacgttatgctgacttcacttttgcttcatacctcctgtgacgttcacgtatacgtgctgcaccgtgaacttaacgccgcagatcagcagacgtttgatacgcttacacattcttatcctgtgacgtttcactttatccatgtaccggacgcactgcttcctccccaaaaagttcttgcaacaagtgcctggggcgcagaggcttatttccggctcgcaatcacggatcttatgccatcctgcgttgaccgtgcgttatatctcgataccgatatgatcgtcaatcaatccatcgatgatttttatttctgcgaccttaaagggaaaaagattgctgcatgcgcggaaatcattcacgaacctcccttcggaaattaccgggacgaactatttgcaccgctcttttcggccggattttcctacttcaattccggaaccatcctttatgacctgcgcgcgctccgcactgactgttcttttcagacttatatggacctagcagaaaagcttgactaccggatacaatttccggatcaggatttgttaaattaccggcacagcaccgaaaccctgtttgtcgatccgctgcgctacaatttaaatgcccgctatgcctacgatatatattccatgcgttatgatgacatgaaacagaacgcatgcatcattcactatgcaacctccaaaccgtggcgcggtaattttgttcattacaatgtggaacagatctggtgggattacgcaaaacagacgccgttttatacggagctgcttcaggaagccctggaggaaacgctcacaaacacagctgtcaattcctacattacgaatcttttagaacaaaacgaagccctctacgcgtgcatcgaaaaatatgatcagcttttaagcgatgccggtattacattataatcttttgtcagaatggagatacctatgaacactttttccatgaatattgccatcaccatcagtcacgcctatgttccctatgcatatacccttctgctatctcttccggcacatgattccgcaaagttccaggtatatgtccttcaccgagatttgacagatgaggattgcaatgttctctcgtctctttcaaagctttatgatattcatgttcactttatctgcgttccggtctccttttccgaagcatttacagacacttccgctccagcggaaacctgtttccgtctatgtctgccggcacttctgccggatacgcttgaccgcatcctctatctggaagccgacatgatcgcaactgcctctctgatgcctttgtatacgctggattttgccggcaaaaaagcggcatgcaccacagatgcgtccggaaatatttccgccagtgttctgctcttaaatctccctcttctgcatgataccccggactatccttccgttttccggcatgctttggcagacagctttgatgtccacaacatcttccgtacatccatttgccgggaagatcttttgctgctggattcgctggagtataatctgtctgcgactgctgccttttcccaatacggtctgcatgccgccactctgccggacaatgtccggcttctccactatacgggtgaaaagccctggcacggcgatcatctgcacaatgacctggaatctctctggtggaactatgcaaaaaaatccccgtattatccggctcttctggaacagacaataaaggggatgattctgggtaccaatgttatcacctacatctccaatattcaaaaagagcatcggcagctgaccgctatcgtcgatcagtaccagacgctcctcgaaaaactatcttgatgccatcagctgatattttaattccgcaatcttccagtcatcttcgttatcaatatcctgtacttcaagttcggagacaatgattggcatcacaccttcgttcacctgtccgtgaagtgcaaggtatttttccgcattataaacataaaactgtccggcatcatgatactgtttttccagatcctgcgaccgggttctgctatactgcggatatttatagcccataaacccatcatcattcatgacataacatctctgtggcggataggaaaacgccgtcatcggcattaccattacaggatgtttttcttccataatcgtctgtgccgcaatgagcttttgtgccgtcacaaagggcgcagtcggataaatacagcagatatattcaaacgttctccccagttttttataattgtccatgacttccataatgacatccgatgttgttgcgtagtcatccgctgtcttcgcgctgcgcataaacggtacacttgccccatactcctgcgcaatctgtgcaattttctgactgtccgtggacaccattacttccgaaaaaagtccgctctttaacgccgcctctatcgagtatgcgataatcggtttgccgcaaaaattcttgatgttttttcccggaattcttttgctgcctcctctggcagttataattgcaatcgccttttccatatttcttccctcctggtcaaactatgattccagctgttgttctatctccatgagtgcctgtccgaatccggctttgctgtccagcagcagttctgcccgcgctctggctttctgtgtcatctccgcatacaacctgtggtctgcggcatagcgcagaatctgtctctgcatggcaggataatcttccacctcgaatatctctcccgccgcgaccgccacatcccctacaggaagtgtcaccaccggcaagccctttgagagtgcttctgccgccgaacttccaccacccgatctggctgggtttacatacagatccatacattccagtaccgcaagcacatcctgctgttctccaagattcgtcgcatgtgcctgtagaacaggatatccggcaagcgcctccccaaaacggtgaaacctgcctacgaacactacgtgtatcgccggttcttctccgactgcctcctccagcattttcagatacgccccggtaacttcatcatccagtcgccatcccacagtcgcaacaagaaatttttcttccggcaaggtaagatctgctctggtgtaatgatcctgctgcggcttaaacgaaaaagtaaacggaacacatttgacgcattccttttgaacacctaattcctgcagccgcatctcatccgtcccggaaagcgtcctcttgcctaccatctgccactcaccgcatgaagtcgctattcccgaaaacacggtgctgactgtaatttgtggtacaattcttccacaaatatctgcacagatatcattcccgccgattccaatgatgtaatccggacgtctgtcacgaatcagctgcacaagtgacgctatcacctgcagatccggcatatcctctggacactgcatataggaaaatgtttctcccttaaattccagtgacgaaagctctgacaattccgctgcgtattctgcctcctgcatatgataaaatggtgcgcgtcctttttttgtcatatacattgccgtatttacaatcattacttctttatgaagaaatgttttcagcacgtagcttcgatccagcagcgttttcgtgggcgcatgtccaaggcccagtacctgcggtgaaaacactattaccagattctgatttcgctctttcctcggaatatagcaccgctctgtcactcccaccgcggtcgaaaatgcctcaaacagtgtatggtataatccggtaagctttctttccacctcagaactttttaaggttccgtctgtaaataccgctcttgtgatctgccagtaatgactgagtttattgtactccccgacttcactgtaatctgccgcaagcaccgtatccaacaatttttccgtgatatatggatcccgcttttgcgccatacaaaaagagagaaaatgaatcttcatccagtccggcacattttcaaccgctacttccagagaatccagcatatgcgcccgcaccgccggctccatctggtcaaattgccgtcccaaatgttcaagggttgtatcaatctctggatacttttcaaaatatgtcgcgcaatcatatgcagcaatctgtgtcctgtattcttcaaatgtcatccgtcagttcctctccgcccacaccagcgcatgccgcagctcgttctcccataccggcttttcgtaatccatatgtagaaaatacccgtctgccctgtccgtctgaaagccgttctctcttaaaatatgctcaatctgtgcttcactctcgtgtgtatgataggcagcaaccacacaccgcatcgccgcggcattccccagaaccttctgtgatcccagcagaacttcctgctccgcacctccgacatccaccttcaaaaaatccagtctgccggttccgatgatatcatcaatcgtcatgacatcacattcggcttctgatccgccaagcacaccgtgtaaaaacaccaccttatcccgatatggtgcaaatgtcttttgccatgcagcattccaacgttcatcccggtctgtcaaatataccctgcttgcatgttctatcacggtaagcgcaaaatatccctcagctgctccggcatccataattaccgctccgtccggaatttgcagattcccgttcctgtagcagtgcgccgactctctgtcctgttcctcgcaaagtttccgatatctctccagaacctgctcgtcggaaaattcctgcggatagtataacggctttccatcaatcatcacataaaacatatcgcaggaagcatcatacagcagcccggagaccgcctgctcatatctggcgcagaccgctcccggacaagactgcagaattgtccccgcttccagatcttgtttccacagttttatccacgggtcttccttctccttgtatctctccttaaaaagccgggtcaccgccttttgatataatagtcggttctcacctgcaccaagcccggatgcaaactcctccagcgcagccgcgtcatatttttcccggataccgcacaacataccatctgccattaacaggagctgccgcaccgagccacagtccgccagaaatacttccagattatttcccgaaaaaaagcggtacccgcaccgttctctcagctgtttctcccactcccgcagataccctgtcagtctgtcaacatcctcctgcaccgcacagccgcaatgttccaaatcgttgagccggcttatctcttcgctcagtcgtacaccgatctcctccaccacgtaagactcacgtagctcgcacagtggaaccgtcagttcgcctcctgcatttgcttcaaagtccgctgtttttccgtgatatacctcgatctgttctgccatctgtatcacgcgctgcatccaggtatgctgtttctgtgccacgcgctttccattttccgcaattttttcactgcgtacgggattctcctgaagactctgtataatactaggaagttcttccagatgatccagttcataaaataccatttctttgccgttggaaaaattctctttcagataatcgcttatatccgtcacgacgaccgctccgcttaacatggcagccgcaatgcgctcctggaatcccgccttaaatccaggcataatgtttagaacaatctttgcctctcctagtgctctgcgtgccacctcggcaccgccatccatcacatgcagatgctctctgcctggacacaatagcttctcccatccgttgccgtagacccagacatccacaccggctttcagcagggtgcgaatcatcctgtcccggtaatattcccttgcataaaactctaccccggaaagttcacttaaaatagcagcaaattcttccctgcccaccgtaacctgacagctttccagcactttctccaaagcgtcctctacagaaaggtacggattaccggtcagcatggtctgcaccgaccactttaccgaatccgcaaatcccatctccgcggtcttgtgcacaggcatctgcggcacccagtaggaaccggtaaaaagcagccctatttcccggttctgatatggtttttgtatgtctgcccctgttccgctcagcggaacataagcaacacgttccagacgcggataatactttttcagataagccgtatgcctcgcatccacattcagaataatatcactttcattcagacgttcaagccgttcgtacaggtacagcggatgatcgcacagataatgcacccgtggaactgaagaatcctctaagcattccggaagtacatctgcaaccatcgcctgacagtctaccagcgcgtagattgaaatgtgttctttcagataccggtatttgtcacgaaatgatttgagatttccgtccagaatcacggtatgatacccaagctcacgaaatgctgccgcaaattctgtaatgtatttgctgaccgctccatacacaccgcttccactgaccagtacaatatttctctgttccatccctgtctccattccggagtgtttctacccactaatgttctttgactgtttccaaccgctcctgaatctgctctacgctcagccactctgtattggtacccgagctgtactcaaatcccggttctacaagtttgccgcccgcctgaatcttggtattgctccaccagtcgaaatgcggatacacaataaagtgcttctcgtattcatatgtcatcatggaatcctcacgtgttaccatgatctcatgcagcttttctccttcgcggattcccacctccggcatctcgcatcccggaagaatcgcctgtgccagatcggtaatcttgaaggacggaatcttggagataaaggtttctcctcccttcgcctcggacaatgccttaataaccagctgtacaccctcgtccaggctgatccagaaacgcgtcatgcgataatcggtaatcggcagagaagtaccgccctcatttacaatattgcggaaaaacggaatgacagatcccctgcttccggcaacatttccgtatcttacaatagaaaagcagacatcctttgctcccgcatatgcatttgccgcaataaacagtttatccgacacaagctttgtaccgccgtacaggttgatcggattgaccgccttgtctgtcgagagtgcaaccacgcgctttacaccgcagtcgagcgctgcatccacaatgttcatggcaccgtcgatattcgttttcacagcctccatcggattatattcacacgccggaacctgctttaatgctgctgcgtgtaccacataatccactccatcaaacgcccggtacagtctttctttatcacggacatctccgataaaaaaccgcagtgtgtctttatattttctgaacttgttcgccataataaactgcttatactcatcgcgggaataaatgataatcttcttcggtgtatagtgatccaacacatactgtgtaaatgcattgccaaaagatcccgtaccacctgtcactaatattgtcttaccgtttaacatttctacaacctcctgtttctcctgcagcctcctgccgccttataatatatatcgaaccattcagcttctgcataaccttcgctgtctaaaattgtcccatatacttgtcactcttccgttttttagtatataataaatgtcataaaaccgcaattatgaaaagattttgcgctttgtccgaaaggaaatattcatgaacatattattctgtaaacacaacagcatctgtgaacccggcattatccgtgctctggaccttctcgggcacaagcttatcctcccgtcctgttccttttcccatccggatacagacgacgcatacgacgccgtgctgtgtgaggaaattcgcaaaaattcttttgatctcgtattttccgttaattttattcctgtgattgcaactgtctgtcaccgtctgcaggttccttatttctgctggatcgtggacagtccggtcattcagctttattcacatacgttacaatacgacagcaattatgtctttctttttgactatacactctatacggagttttgtagaaaaaatccggggcatattttttatctgccgctcggctgcgaccttccgcattatgattctattataccgactccgcaggatcacgcaaattatgactgcgatgtctcctttgtcggttctctttatacagaaaagtcgccttatcgcgctatccgcacgcagcttccttcttatatacagggatatttcgacggcatcctgcatgcgcagcagctcgtctacggatacaactttctgtgtgacatcatcccgccagatctcatggagacattggatcagctgatcgatgtatccccttctcccggctatgatctggataaacgcacactgctcggaaatctgcttttaaaccctatgtgtacggagatggagcgtattcatctgctgaattccatcggagaacacttttctctggatctctatacgcagagtgatacgtccccactcaaaaatatccgtctgcggggaattgcctcctctcttgacggaatgccaaaagttttcaaatgcagcaaaatcaatttgaatcttaccgcaaaagggatccagtcgggcgcttctctgcgcatttttgatgttctcggttgcggcggttttctgctcagcaactatcagtcggaattaccgcaattatttgaagtcggcagagagcttgtcctctttgacagcgaagctgatcttcttgataagatttcttattatctgcatcacgaagatgaacgcagggaaattgctgcaaacggttatcagcgaatccgccaggaatacagttaccaggcgcggcttgcgttgatgctggatgtacgtcattccttatccatttaatataagtgaggtacctatgaatctgttattttaccgctatggaagtatttgcgaacctgatattatcgaggggtttcgggaactcgggaatcaggtaacagaaatcacattggaaatttacaataagaatctcggtcccctggagggtcttaccgctctgaagaatgaattgtttgcacacagctacgattttgtgttcagcatcaattactatccctttatctcggaaatctgcaatatcttccagatccgctatctctgctggacggtcgactgcccggttatggaactatattctgacaccgtgagcaatccgtggaaccgtatttttctatttgaccgtgcccagtatgaagagattgctccccaaaatcccggctgcattttccatctgccacttgccagcaatccatcccgctggcacagcgtccttcaaaaggcgtctcctacggagcatgcaaaatatgccggtgatgtcacgtttgtcggctctctgtacaccgagaaatgcccttatgatcgtctgcagaccgattctgcctacctgcgcggatatctcgagggtatcatggatgcgcagcgcagcatttacggctgctactttctggaagacctgctgccggattctatcgttgccgaatttcgcgaggcattgcccggattctacattccgccggaaaaatccatccgcgacgaccgcgttgcgatggctcagatttatctctgtgccaaaatttctgcgcaggaacgtgttcgcaccatgcagcttctgggaaatcattatccggtcacgctatataccggaagtgattccaccggtctgcccgtccaaaataaaggccttgtaaagacgctgaccgagatgcccctggttttctccaacagtaagatcaatctgaacattaccgcaaaatccatccggtcggcattgccgcttcgcatttttgatatacttgcctgcggcggtttctgcctcaccaattaccagccggaacttgaggatctttttaccgttggggaagatcttgactgctacgtcagtgaggatgatctgcttgccaagacggaatattatctgtcgcatgagaaagaacgtgcagagattgcacagaatggtcttctcaccgtccagaagaagcacaactatccggagcgtttgttaacaatgatttctctcgcctatggactatcctaagaggtatatcatgaaaatacttttttttgactcgcctgcatttgccaagcaggatatgattgatgcgtttgaagatatgaatattgcctgcgaccttttttttcacgaggagtacaacgacagacagagcactgctttttctgccgcatttgatgttgcgctccaggaggcatcgtatgactttgtcttttcctttaattattaccctatcctctcctcctgctgtcagcgtcatggaatccgttatgtttcctacgtctatgacagcccactggtagctttatattcctgcacgctgatcaatccctgcaattatgtctttctttttgataaggcgacgtatctgacctttaaaaatgccgggatttccaccgtctattatcttcctttggctgcaaatgtatcacggctgtcgcaaatgacctgcccggcatctgcacgttctgcggtatcggcggaggtatcatttgtcggctccctttacaacgaagatcacaatctgttcgatcgtttaaacggcatctccgattatacgcgcggttatctggaatccatcatgaatgcccagcgccaggtatacggcgatttcttcctggaagatctgctgacgcaggatatattggatgaactttcacgtgtatgcccttaccggcccatgtccgacggcacagagaccctttcttatgtatacgccaactattttctgtgtcgcaagattacttccacggaacgtcttgcattactaaaaaaagcttccgagcagtttgccctgaagctttatacacaccatccgtcacctctgcttcccaaagcagaatttgtcggaccgatcgattattatcaagttatgccgcttgtattccggcacagttccatcaatttaaatatcacgctgcgtagcattcactccggcataccgcttcgctgtatggatatcatgggaagcggcggttttcttctgagcaattaccaggaagattttcttaatgattttgttcccggtgaagactttgtcttttatgagagcgaagatgattttgtacacaaaattgactattaccttgcgcacgacaatgagcgccgtcagattatcgcaaactgttccgggaaaatgcaggcggcacatacctggcagcatcgcatcgcccgcatactagagattctgtcgtaatctcccgcttaatatgtaaaattcagcccgtcatccatccattttgcaatctgttctccgcgccgcttccatgtatgtttttgtagcgccttcttccttcctgccgcggcaattttggcagcacgtccgggattcgagagcaactcatcaatcacaaccggcagctgctccggcgcatctgccggatacgtgacaatctcttttccgtcttcaaaaaattttttcagtaattgatacttactggtaacacagacagctcccgccagcatcgcggtaaaaatgcgttcgtgcatgcccgtctcaaaattgatattgtgcagcacaattcgtgaattctgcatatagcggataacttccgtgatgtcaacgccctcctccgacaaaatatccagattttcagagcctcctccctgataggtattccaccctctgccaacaacactcacacgtctcccggcctttagcagctcctccagcatccgctcccggatgcagacccgctgaaactcatctaacggatagaacgctctcagaagtgtctgaaattcatcctcgctcatctcgaactgtatttcctccagataacagcgaagctcctcatcccatgttctgatgtgtccattctgaatcaggcgcgccgccactttctgtgcaatacttcccataatcccgtcgatcttttttaatttttcccacacagcttcgcgcgacgtataactccccgggaaaaatacatcaatctcccggtcttcccaccggggaacctgttcgcttgcaaaaccgccatggtaaagcgtctctatcatttcaaacttgggatacatctctctgatccgctgtgtaaacgcatcctgtaccgtcaggacatacgctcccgttccaacgctgccaatcagcctcgcctcatgaaaaaagggatcatccaccagccatcccactctccgcatatcacgcagctgcggcaaagccgtacattcctgttcccatccgattgcctgcagagaaaaacaaaatgcatattgctctctctgttccaggcagccgctcaaccgcacaaggaaatcctctgcctgcgtatcaagcacttccgtctcgcagccatatgcacggaatccctccgcgatttcatcggctgcctttcttagtacattatatgccgagcgcccctttatcactaatactttcttcactcaaattatcctctatatcctccaacagcatctgcactgccttctggtatcccaaaaacaaatttaaattcagctctgccagatctctgattcccatgttttctttcgtgtaaatcgtatcaccgagttcatattctgccttttgcgcatatacggtcatcataccaaacaagggcatatgttccaggatatcattctcctcgagcatatcccgcaacactctgacatcattatccgttacccctgtatcgccgccagattttcggcatagactgtctaacgcttgaatctgtttttcgataaatttctgcaaatcccctgcctgaagtttcaattttctgtaagctttttccagtttttgctgttcctccacagaaaatgccggcggtatcgcctgttcaatcttccggaagtcgaactctgccgggcactctcccgccacaacctccgacattttcatattctccgcgccttcaatcttagctccgccctctgttgcatcaatgacacgcattcgatctccaccgtcacgaattgccttttcaaaccactgcttgtaataccacatctggaaatccgtctgaagcattgttccgtcgattccttccacttccatcaggcaacggctcttaatgtatttatcattatcgccaagtgctccctcaattccggaagtatgtgattttccaccggtaaaagccaaatcctgtcccataaatacaattttgcgaaatccgaaataaagtgccattgcaaatgcaatcgaactcaccgatccgccagtcggcagaaccggaaaaccataccccagcatctcagaaatcgtctgattccagcctttttcaaaataaccgaaatagtatacccgctctccgtacttctggataatttcgggtttggaggcgttttcacaacaccatgtcagcccacgcaaatccaggtctgtgaagaaacgctccggtgggttaggatctaccgtacacaccagatccgggtggattccagcacgcagaacagcgcgaagtgccgcatctacaacgataatcagcgccctgccctgaatctttttcagttcctgaatattcttgtccagagacggtccggcacacacaacaactgccggaatgtcctctaagggatatccttccagtgcctctctgatctgtccaatgtttctcgtccgaatcgtatgcttcatattataaagcgtattacgcggtatcacgcgttggaaacttaaactcgtccccttctttactgcctcatcccgcatccgctcaatgatcaaattctgaaactcttcacattcctcgtgaaataatatatcgtatcctggcaaaatacagaattctgtaaatgtgaaatctgaatattgcaggttttttttcataatatcttcaatactgtctgttgcatccggaatataaaattgcactctcttatcttccagaatatccgatacatcaaattgctcacagcattcctcaaaaatctccacactaggctcacatatcacaatatgatttgtatcatcacatttttttaaaaattctctcacatgtcttccgtcggaaaatccaaatacaaaataggttccatatgtgcgaatctgataccgtccggcataaaccgctgctgcgaatgcagtatcatatcgactgttcaaataccatttccggttttctctttctattccaaaaatccgttcgccatccgccgccatctccaaaaacacattcttcactccggcagcagccaacctctgctcaaggaatttcggcataacatgtttcaatgcccttttattattttccaaaatctccatgtacacttctccacttttgtctcttatctgctttcaccgtctaacgccggcaggattcctccgtataatatatctgctataccaagcagatcctgcatctgataattttcaactaaaatctttacaacaggaagcagcgcaagaagtttctctgtctgcgcctgatccgccagattctgtaataacatctgatattcctgcaataattctgccacgtgctgcagtgcttcgtgttcacgattttggtatgcttcctccatcgcctgctttgtcttattcacaatttctatggacatttttttctccctactacgtcaaaagaccgacagaaaactgtcggtcttttgaattgtactgaatcgtacttgtaatactatctgagttccaattactgtaacagagaaagtacaccctgagtagactggttagcctgagcaagcatagactgtcctgcctgagcaaggatgttgttcttgctgtactcaaccatctcttcagccatatctgtatcacggatacgagactcagcagactgtgtattctcagagatgttgtcaaggttagcgattgtgtgctcaagtctgttctgtaatgcacctaacttagaacgcatagcagatacagagctgattgccttctgaacagagctcattgccttacctgctgaagagaaagtagatactaacagtgcgttaacaccgataccagatgcagacatgttggaaatgctgatcttgataacctgtccgtttaatgcaccaacctgaaggctcttagatgtgaagttaccatcgatgaggttcatggtgttgaactgggttgtagaagaaattctggtgatctcagatgctaactggttgatctcctgctggatagctgtacgatctgcagtcgtatttgtatcgtttgctgcctgagtagctaactcattcatacgctgtaagatagagtgtgtctcgtttaatgcaccctcagctacctggataagagagataccatcctgtgcgttgtcagaagctttgtttaagcctctaacctggcttctcatcttctcggaaattgtaagacctgcagcgtcatcgcctgcacggttgatcttgtaaccagaagataacttctcagaagactttgcctgtgcgcctgttgtgatacctaactgtctgttagcgttcattgctgtaagattgtgctgtactaccataattgtttcctccttgaatatgatgcagcatccatgctgcatgtgctttgtaatgtggtttctgcctctcccggccgtacgctccgcttaagcttccacctcaagtaacaattgttatcttgtttacttgtaatatatatcggacgaaagtcacgatactttatagaaaaaagaaaaatctttttactatctgcaattattttttgttgtccgtaaactgcggctccatatagccggacttcatcatactcttgtaatactgattgacgaccttctggctcttacgcacttccttgacctgtttgcgcacagaagcaaacttctgcgtcatcagatctttgttgcgcgcctcctgcgcctgaatcgttgcgctcttatcagtcagcctgcggatgtattcctgcatttccgcaatctcttcgcggtattcctgctgattggtctgcagatctgcttttatcttatcgtagacctcctggaatccggtgtcaagaagttccaactgttcgatctgctttgctttttcctccacgcaggcgtcaaagtcatccggatcaaggcccggattctccagttcttccttctgtcgtatattcagttcaataaccgcatccagaaccgcactttttttcttcaggctctggatcatgattgtaagatatggattcttctccattcgctgctcctgtcaatctgctgtaaccgacacaccgttgcttctatcttgatgcatgtgccgttctcataacttccttccatgtatcacgcatggtacgaagatgctttagcacctcttccatgatgtctttatctttttttatatttgcctcgcgaaggcgcatcaacagatagttgtagacctcatcaaaatcctttgccaccggatatttatggtcaagtgtactttgaaactcctcaataatgcgctgcaccttcataatattattgtgtgctttctgaatatcattcgcatcaatcgcctcgatcgcaagattcgcaaatttgatcgccccctcataaagcatcaaagtaagttctgccggggaagcggtcataatcttgttattggcatacgctgcatatccctgattcgccaacataatactatcctccatacatgtattcgtctctgccgatgtttttacacattcggcagagacgctgtcacggcattatgccgtttaatttccaaacaggtttgacaacgatgatgtctgactgttcagcttcgataatgctgtttccatcgcggaaaacttattgtagtagtagtcttctttgtcctgcaatttttcttcccatttcttgatgagatccgtataatcgctgtattccgacgccatctccttgtcattgtataccttgtagctgctacttaaagtagacgacttcattttatcaccgattgccgtatataggtcagatgtcaattgttgcataaaggaaaccaccgtatccggatctgaattgatcattgccatcagtttatcgtcatttccagacgtagcagtatcatcggaatcgccgtcaatatggtatgcatattcctgattctcaggtgcattgaaataaccaagtgtcttaattccgaaatttgacagataataagtctttccatttacttcataacccttgctcatagagtttgtcatggtactcatgatcttttcaaggctctcatcacggcgcagcagggaatctttgatcttctgctcccatttttccacctctgtgtctgaaagcgcatctttttcttcatctgtcaacggctcataaccctttgcagaatctgcattgtaaagagatgtcatctcgttgatcagcgcattgtactgtgtcaggaaatccttaatcttatcgtaaactccctgtgtatctgtcgatgtggtaatgctgatcgcattcgtatctcccacaccggttgcctgcagcgccgtaatcgaaagtccattgatcgagtaggtattcatggaacttgtatatttgattccatttaaagtaatctcggaatctgtaccatcgatcttcttagcatctgaattgtacgttacgttcgtgccgttctgaatctcatgggcactctgcacctggctcacaaagtctgcaaatgcggttgcatactctgcagaagtctcatccatcgccacgagcttcgacagtaccgcatgtttatcaagtacctcctgatctgcctccatggcggtcttattggtcgtaatctgtgatgcgtaggtattagtaagcgtcgtcacccccgccgaaccattcgccgcataggcattctttaccgctgctgcaatgcttgctctggaagcactgtcagagctgtctaacgtatcctccgcattttcaaatgcattgactttctcaacatttgaggtcatcttgttgacaaaatcatctgtcagagtgtccttgtttgcttcttttaaatctgtaagcacatctgcggcacggccgatatctgttgctgcggctttctgatgatacaccatcttctggatttcactctgtgtgcaggcagaaagtgcaactgtcttgccgtctgctacttcattaccgtcactgtcgatctgtaccagattgccactgctgattttgtatgtattcccgtcagaacccgccagagtattgttgtcattctgtgtgtaggtcacaccatttccatccgtatacttgtaataaccggttccacgcgattctgcggttacctcatagtaattggtgttctccttgatcgtggcagtgttcaccgtaccgtcatccgccgtatatgaatacgtggcattgccgtctgtgtccttcccgccggttgctttccatacatgaccattaccatctgtgtatgtgccgtcgtcattcttggtgtaaacgttattgctgccatcctcataggtaatcatcctgcggatataggttgtatcaccgttctcatccttatagctgtaaatggtattaccaagactgtccgtatcggacttcgtgtagacatttccgtttgcatccatcagggaatccacacgctgggatgccgtcattccaagcagtgtctgcagttttttctgatctgtatcagaaagaccgctgctctttaaagcatccatcattgccgaataagcgctggcataaccataggatgcggtcaggttggcattctgtgccgtcttcgtcttgtagtcctcctgcgctgccttgtaagccgcaatcgcatcggtgatattctggttaagtttattgccgtctgcatcataatactgtgtataggatgtataggttgcatcggttgcatcggattttacattcaatcccagtttggtaagcgcactgataccgtcagcattgccgcccgtaagtgtaaaatcgttgtcttttcctgtctctttggagctcacaaaaatacgatgatttgttgcatcgaagttcgcgctgacacccgcatcttttaaggacgcaatgaaactgccgactgttgttccctgtgtcacttcaatggaggtcgttgttccgtcgccttttgtcaaatttatcttaccgtccccaccggtatagccgagttctgccagtgtggtactggttgacacgctgctatccagctgaccgccggtcagatatcccgcctgcgccacgctgataatattcagcgactgcgtgccactcggtgcactgttgctcgccgttaccgttgccttggtggtgtcagatacagtggtagatttcagattataggcgctggaaagcttgagattacccacgctggaatacagactgtaaatcttggtattgagcgtcttccacgcatcctgcttccaggaaagcttagtctgtgctttcttgtacttgttggtcttatagttataagaagataccagagccgagatgatcgcctctgtgtccagtcctgaatttaatccggtaatacgaattggcatatgctcaccgttcctttctataacttctcatccacaaggattcccgcgatctcccataccttggcgatcatgtccagtgtctcctccggcggatactccttgatgacttcctttgtggtcttgtcgatgatcttgattgtaacacggttcgtcttgtcgtgaattccaaagattgcctccgagttcttcatctgtttgttcagatcattgaccgctttttttaactgagtgccctgctttgcatctttttcctcggacggattcttatcctcctgatccttttctgtaaaaaagttctgcactgcgggctttttatctgctgtctgcgacagccctgcctgtgtggatgcttccggctgtaccgcagtatccggcgtttttgtggatgccgctgctgcacttccctgatacgacgctgctgctccgctcttcatgctctctatttccatctcttaccacctccgtgtgatacatggctcctctatgttcccggttttctatgtcttatatcggagaaactatggcttttattaaccgcatcagaaaagattcttcaacgcctccattgcatctgttgcgttcaatgccgccttgttctcattctgaatctggaggtaaacctccttgcggtataccggcacttccttcggtgcactgattccgatcttgacctgatctccgcggatctctaacaccgtgatctcaatattattgttgatgaccagtgactccccttttttgcgtgtcaatgccagcatgccttattcctccgctttcttctttccttttactacgtcatagatcttatatttgacaggatagtcatcttccacaatgatctgtgctcccctgcgggtgtctgtgttaatgacaatcggcgccttgaggttcaccgaggtatccttcggatccggcgctgccgtaagtgtgacgagcacgtaagtattgtcctctgtcatcccgccgagcggacgaagcatctcatcgttcaccatcggattgtaatccgagcgcacgaggtttggctgcatgaccggaaacgccgtgtgcggatcgtccatggactggaaccacatcacggaactcttgtctttttccttttcctcatcaaatatcaatgcaaaattccggtattccggaagtccgatcattccatcctccaatgtaatgatcttatcatccgcaatatcgatttccccaaaaagtcttgtgtttgctttcatcggttctcctccagcttccccgtttggtgtctgttaaatgtaattcagtaatgttgtctgattgatcttcgccgcagcctgtaaggatgcctgatatgcggtgtacgccgacgtatagtcaatgatgatctcagacaggtcgcggtcttcgttggtggactttaattcctccatcgtcgtctgctggtttgccatacggttcttggtcagatccaggctctgtcccttgcttccgaggtccgtgttcgccagattgaccttctgcagataatcgtcaaaattcccgatatagctgttgtaaagcttctgcagattatcgtccgcataatcgcgttctttcttcgccgctgcgatccagtcctcaagtgccgcctggcagtcatcggaagaatactcctgcattttctgcattttctccagttcctcgactttattgtttgcgtcctgcgcgaactttaccgcctcgatcatggcgtcaacatctcttccgatcgatgcatcaaatacggcggatgcctgtgtattgaccgtcagggtctggtttgccgctacgacgtaattgatatcctgatagatttccttgccgttttcaaactttatatattccaccggttttgccgcatctgtgatgttggtgcagttgtaataatactccggacgtacctcacccttgttaaatcctgtcttggtgtagttgacatccaggcttgccctgccgctcttgatcgtcgatgacgcatccgagcttaagatcagctcgccgctctccttaataaataccgcttcaccgtctgtgatattgtaggtgttgtccgcagtctgggatgcttttgcccagtcctcaaacgtatcgtatacggttaccttcagttcgccgtccgtctgtgtcacgccggctgcatctgtgtaggaataactgagtgttcctgtcgcaccgtttgccgacagcgcattgccgtccttgtccgtgatgctgtcgatctcgccgtagcttaaacggatacggtcgaatgtcgcctgcttcggattcgagatggtgttgccggtcacctccgccgctgtggtcggaagcgtcacctcatcgctgtagtagcggtgctcttccagattcttataggaaagtccctgcgtgatattgtaagatgtcgtattgtcgtctgtcataaaggtcagcttctgattcgtgcggtaaccggtaaaaacggtacgtcctgcataatctgcatttccctccgcatagacctgatcccgcaacttctctaactgagtcaagatcgttttgcggtcgtctgcggtaatctgatcggacgctccataagtacactgtgtgcggatgtccgtcagaatcgtcttcatgttggcaagcgccgtctctgtcactttcatccaggattctgcatccgggatattgttctcgtaatactgatcgatctcgctgagtgttgtgcgcagtcttaaggagcgcactgcaatgaccggattctcggaaggtctctgaatctttttctgggatgtcatctgattgttcagattgttgacattcaccttatttccattgatattgcccgtcgtattgtgaagtataatgttattcgtaatacgcatttatgattcctcctcatgtccttgtctatacaccggtctcaaggatcagtctgtcataaatctctgccatgacagataccatctttgaagaaagattgtaggcattctggaatttgatcagatccattgcctcctcatcttcatcaacgcccgaaatcgacatacgctgcgtgtcaatcgcgctcgccacattctggtaattcttgctgaaaatttctgactgctgggtgtccacggaaatatctgcaatcatgcattttaagaatccgtccgccgtacctccgcggtaaagcaccttgccgctctttaacgtcgcaagttcctccacgagatcgtacgcatccacgccaccctttccgttgatgtcaacggttgtcgccagcttggtcggatccttgacgatcatgctgttcacgcagatatttgctgctgtcagcttgtaatacgtgtctgagccagatccgttgactgcattcccgttcgcatctttgccgtcgaaggaaaactcttcgccggtcacggtgtctgtaccggtgaaaaatgcatatccgctggtggaattgccgtccagatcgacaccttttttcaaaatattgttgaattccgtcgcaaagctgcgcaggaactggttcatctgactcatataatacggaatacccatcgcgtcaatcgatgttccgaccgatgccgtgcgtccgtctacacgtgcctgctcttccgccgtgagcgctctcttcatattaaaggtataggaagtgatgttgccgtccgcatcctgctcaaaggtaaatccctcatatgcgtactctctaccgttgatcgtcaatatgccttcctccggcatgctgactcccacaatactcgtgatggaaggattggtaatctgaacctcggtgctgttcaacacctttgccagtcctgagaaattctcgccgttatttccgtcacggatgtcaaacagcgcttttaacgtgccggacatcgagcttccgcccgcattaaaggtattgcctgtcttcgaccatttaatatcataaagtccggctgcatctgtctgattgaccttataatctctcgccttgcactcgagtgtctcgtaattgtaggtatctacaagcacctgaccgccgatttttacagtgtagtaattggcgcctgtcggctcgtccggatggtttgtatccgtgatcggcacctcggaaacctcagtcggcacaatctcggacagctcatcaatcaacagcgcacgctggtcgcgcagctcgtttgcgtagccgccctgaatctcaatgacgttgatctgcttgttcaataccgctatcttctccgcgatcgcgttgatattctggaccgtggatttgatctcatcgttcgtccctttctggatatcagtcagtccctccgacacgctgttgaagtaggttgccagattctgtgcgcttccaataaactgctgacgggtgttgacatccgatgcattgttcttcaatgtatccagtgaattgaacatcgtgttcaggatcgtcgtaaagcctttggaggagctgtcatcgataaaatagttctcgatctgctgtaagtagctcaattttgtctcatacagtccgaccgatgactgattgtaccagtattttgtatcgtaatactgatttcggatctgcttgacggacacggttgtaacaccggttcccacagctccgtactgctggtgcaccaaaagcgcatccgatgccacacggttcgactgctgtctggagtagccggtcgtctgcacgtttgcaatattgttagccgttgtattcagtgcgacctgataggcacttaagcctgatgatgcaatatttaaaccaaaaaatgtagatggcatgtaacaccctctctttctttttacgcgctcaattatccaagctgggtcagcagatgttcgatcatctcattgaccacattgatgaaacggctggctgcattgtaagcattctgatacttgatcatgtaggtcagctcctcatcggaagatacgccgatgacctgctgtctctgattgtccacagaagccaccgttcccgtgaggctggtcgctgtggaattgtagacatttccgtaggttgccatctcaccgatcatatctttgtagtaatctttaaaactgcacgccttggtgtcgttcgggttcagcgtaagccgctcctcatcccacacaccggccagctttgctgccagtgcataatcgacatcaccgttctggcatagatgcggcagcagcgtttcatcgatcacaagcgcctcgttgacacttaagctctgcagtgtgtactgctttgtggtatcgttcgggtcctcttcattgtaaatgtagatctccttggtctccgtcaccgggttgccgttggcgtccactttcggattgccgttctcatctaccggctgataggtgtaagtcgcctttgtgtaccgctctgttccgattctggagaacagttcctgcggcggaagctgcttgtcggaaccggtcgcacagttgtctacatccagaattttggtgttcgcatttaatgttacggtcgagccgtccgccagtatcacatccagcgttgtagcagcaccgttcgtaagattcttaatcgtatcttccgcagtcacattcggacaaagcacatcatttaacgcggtcacaatgccgtggatcatctgatccagctgtgcctctgcccgcagcatgacggacattccggtcgtatcgttataggtatcctgatccagtccttcaatatccgtatagttcgcgatatggtcgccgcgcgccagtaccagcgctttcagttcacccatatcgttcttgttctctgtggagatatcccggctgccaaaatcaaatacgttgacgtattttcccttgttcacatccgaaaggtagccccagtacggtgtgataaaaccggtcagcttgtctgttttcttctcgatatgatagcagcggctctcatcgataaactccgtgccctcaatgctgactttcacaataccatcggctgtctcgttgtaggaaatatccacgagggcggacagctcatccagcgcctggtctctcgcatcacgcagggtcatggctgtctcgatgccgcccgcctctactttcatgatttgaaggttgagatcctgaatggtatcgccgagcttgttgacctgatcgatattatcactgatctgcgtattgatgttgtactggtaactctgtaatcccgaataaaccgcattcgcgcggctcacgaacagttgggctttctgaacgaccaggttctggctcacgctgtcatccggcgtcttgtataattcctgaaaagaggtccagaaatctttcagtgcatcctggaaagcctgtccctccatctcctgaaaataagtctcgacctcgttggtcgcctcgtaagttgccgcatagaatgcctgccgtcccgactccgtgcggtaagagcgatccagaaaaacatctctggaatgaatcacatcaccgatgtacacgccgagtcccgactgctgcttgctgaccgccgtcgtctcattaaaggttacatagttgcggtcggtaaacagcacctgctgacgtacatatcccgtggtatctacgtttgcaaggttgtttgccgttgtatttaatgcgttctggctgctctgcaagccggacacgccgataaacaatgttccaaaaccatttgccatggtatcttcctccgtgctgctctatctactgcttcgcgtcaaatccgctgccgccaagcaggtctcctgtattataggcgtttttattgtaattagcggtctccggcgcctgccgcatgctctttagcagcgtaaggtcaaattccaccatctccatcgcctgctttaaaaggtcctcgttctgatggttcaatgtctgcatcttcgttcccacttctaaaagtctgtcccggcgctccgcaagcatctgctgctctctgggctggttctccagataaccgatcatacggttgatcgtcatctgctccggctttttcccgagaaccgtcgccatgtcattaagcacctgcgtgcgcttgttcgacaggtttaacagggtgctcgccgcctcctgctccttctccgtcacctcgccaagcttcgcaatgtccgctttgataatcgcctggctcttcacatccgcgagatcaatcagcgtcagatattccgtttcttctttttccagaactcccagaagttcttccattaaactagccacaatctgccctcatttctcttatcctacagcataaaggaacgatatttctccagaagcttctctgcaaaagcctcgttgctcacatcgtaagtgccggatttcacctttgcggagagcgccgccaccttgtcctctctgatgtcagaagtctcggctactgcctgctttgcgatctgataatcatatcctatggaagagatctcaacctgatcccggctcttctcagtctttgctgctgcggatgccccggctgctctgtttgtcttataaatctgtgccacgctgttatacgcttctactcgcataatggcatctcctttctattctgtaacgcaaaaatatcttttctagtcaatatatcggatgatttggttttttccttagtgataatttttatgagataaaaagatttcgtcttattttcatcattgacggcaccaaaacaagggcattgatctgccctcagagtcattcttaaggcgcagatgcaatcccctgcaaaataatgtatatgaatccattcatttgaatacaagcacctgcttacccgcagataccattactgtgcaaaaacaatttcactgtgcatcagccaattcgctgtataaaaaccgtttcactgtgtatcagccaattcactgtgcaatggcaatcactgcaatacgagtgtcacggtcagtgttccgccattcgctgatgcctgaatcagcagcggctgtgaaaatgtattcgtaaacttcagatccagatagctgcctgcaatcgtcgcgtcaagtcccgccggaagatagtctaccggaagggaatgtgcatggcgctccgttgccggaagtcccgcatataccatcgccgcatacagtgtggacgatacctggcacacaccgccgccggtgccggtgccctttttgccgctcacatagatcggagccgtcacatatccgttcgcggatgtgcgcggtaagatggtattgctgaaagaaaaactgccgcccggctgtaccaccgtgccgttaatgcgctgtgccgcaagtgcaacgttcgttgcgcgcggaatattgtcaacataagaagtcgtacaggtaccgatcaccgtgccggatgcctgctgcgtgctctgcgctgtcccattgttctgtgtcccagtctggctgtccgtctgctgcgcctggctgtctgcctgctgtactgccgccaccggctgtccgtccgcgctgccgtttctgccctcggcttttccatatgccacataatgtctgcagtaagccgccatgtcgctgccgaacgccgcctgcagatcctcataacgctgtctgtatgcctgcggattaaattccgcgctggcattgcggccttccttcacgccaaagctgatgaaatggttcagaagcgcatctgcattatttccataggctgccgccacatccggatacgccgcactgtaataggatgcgtcaaacaccgcacggtacgccgcgcgatccgcctgccctgcctgtgcctgtaccggatgcatcaccataagcatcacgccagacagcacacacaacattcctaataaccattcctttttcacagctctcataactcttcctccgaacgtaaccacagtttcctcacagaccgccttccttctgtctttctcctgtgtgcattctttccgtttcctgcggttctgtctttttttgcattgtaacagagggtttatcaaaaaacaagcaaagttttcagaaagtgtcagaaaaattgcatttgtatctattttccgcttttatcttcatcaagtggttctttttcttcctccatttgtgcaaatccaagcacaaccttaaagagatcgccgtccacatagagcataaagctgccgcccatcagttccatcaggctctttgcaatggagataccgagtccgcttccctcggtattgcgcgattcgtccccgcggacaaaacgctccataagttcctcactggatatgttgagcggataccgcgatgtattccggaaaatgagctccacctgcccgccgttctcccgcagatccacgtatacccgcgtgcccggctgcgcatatttgcagatattgttcatcaggttgtcaatcacgcgccagaaatgcctgccgtccgccatcacatacaccggcgtctccggcttctggatcagcagtgtcagatctgcggcgttcagtttgtcctcgaattctccgacgatctgcaccacagagacgcccgcctcgagtttttccagatgcacggcgagattgccagtggaagctttcgacgcctcgatcagatcctcgatcagctttttcagccggtttgactggcgctctaacacttccagatacccctctgccgtctcattggaaagctcctctttttccagaagatccacataattgataatggaagtaagcggcgtcttaatatcgtgcgagacgttcgtgatgagttccgtcttaaaccgctcactcttcacgctctcggcaaccgcctttgccatacccgtctggatgctgttgaggtgctcgccatgttcctttaagtcccggtacatgtgcgtcgtatcgaccgggtgctccatatcgccccccgcaaggcgctcgcctccctctgcgagacgcttcatctgtaaaactccccagaagatgcatgcgaactctacgacttttacaaaccgccagcccgctcccatgctgcttcctgtatgaagcgtgccggcaagcgcttccgccatcatggcaatgccaaaaacaagcaccgcccttaggaaaagaggcagattccgggtcaccgcgccgcagagcctgccgaccacgctaagcgccatgtagacgacggtatttttccaccatgccccggctttcacgcgcgcagcaaaggtcaacagcgacagaagcgcaatccatcctcccgctatgaggcaaaacagaacccccacaagcatcggcgctgcagcatttctgccgttgacagcttccatcaggatcagaaacagaaatccctccgccaccagcgcaaatccgagatacacatcaagcggcatgccatccagccaggtaagcgtaatcccgtcctctcccgcgtgatgccccgccgaccgcaccagccacaccaggcagaatacggcaagcacaaatgccgccgccagaatcgggaaaatggcatagcggacgccatacatcagcgccgtaagcgtcgtcacctgcacaaacaaatcgtcactccagccaagcggcacattctccggaagaatcgtgactacccagtatttccggtgcagtgattccgccgtgtagttcatctgcagcatgccgtcagtaagctggtacgttgtcctggcatcgcttcccttttgctccagatcagagttcccgattacagtgaccggtatccccacaagctcaccgcaggtgactccgtccagaatcacactgttcgtccagtcgaccgtctgaaatcccgtgttttcgctcagactgtctgcatcgtcgaatgtcacataggtcccgctgtacgcatggagatccagatattttcccacatctgcgtcatacgtgtaatcatagcctgtcgccagatccggcgacagcatcagaatgctcacatgttttaccgggatgtatgcgtccggcgtttcataataaaatatgccgtcatctgcattgtaacaccgcttctcaatatccacctgcgcagcgtaatctccgccatccgtgtagaggctgtacccgccccacagcgtcatgctgtaatcgtagcgtgtcacctcgttgatgtcatagcttttgcagtacagcttgtcccttgtgaccttctcatcaaaattgcgctccacataagtgtacgattcgttgagatctacggaatcaatattttccgcttcaatgattccatagcggaaatatgtgtctttccagcgattattttccggttttgcaccattttccatgttcacactgtaatccagcgcccggatggcatactgatctgcaacactctgataactctttgtaaggaactgctcgcgcgacatctcatacacgcccgcctgatccataagcaacacgccggcagcccctgtgaaaaataccaccgcaccgagcgtgatgccgacccacgccgccgcttttgctcccacactgtcttttctgtttctcacactgtttcctccattttatagccccgtccccacacgactttcaagtagcgcggctccgccgggttatactccaccttttcccgcaaatgccttatatgtaccgcgaccgtattctccgtgccgtagggattgtcccgccacacctgctcatagatctggttcggcgaaaatacttcccccgggtgttccatcaaaagttttaaaatatcgtattccgtgcgcgtgagcgataccggctccccgtcgagcgtgacctcctttgtgcggtcgcacagttcaatcccgccgatggcaagcacatcccgctcctgcttcgtactgccgccaagctgcatatagcgccgcagctgtgattttacccgcgcctgcagttccaccgggttaaaaggtttcgtcacatagtcgtccgctcccaccgtcagtcccagaatcttatcggtgtcctcactcttcgccgtcagaaggatgaccggcacgttgcttttttcacggattttcaccatggcagagataccgttcatctccggcatcatgatgtccatgagcacgagatggatttcttccttatttaatatatctacggcttgccttccgttgtatgccgtaaatacctgatagccgtccgccgtcagatagatttccagagccgacacgatgtccttttcatcgtcacacaccagtatgttgtacattttctccccttttccgcgtaaactccccgcaagccgcgccgcacatgccgcctgccgctatttgacgctttttgattctgattttattgtagcggaatgtttatgaagttaaaagaagtgaattcattaagatttgatgaagaaaggaaaaagacaggagggcgtctttcctcctgtcttttttatatctacatttaattataaggttctattctgcatttaagccattttctgaccgtccactaatagaacagcagatttccccgcttctttgcctgctttagcatcacatcaaagaacacgcttcctatcaccagccacaccagcgccacgatacacaatcccggcagcatgcctgtatattcaccgccaaccgcgatctgacgtagtatttcgttacatctggtcagcggaatataatgcgtaatctttaatatggcatcactggtcggcacggtatccgtcacaaaaagaagcgcggtctgtatcagaaatacgatcgttcccgtccgcttaaagtaaattgcgatacctgccacaatcagacctatgccgtacattccgagggattctaatagaatcggcaccagaaacgccggatgaaaagaaaattcaatcccccacacgaactttgaaatgattacaacaatcacaatcgtaatcgtctcaagcagtaccgaggagacatataatcctccaaacagatactgtaacggatattttgaggataccttcttgtacaaggttccgtgtgtcagctcactctgcagcgatcccgcgacattggaaattgctgagattgcatagatccaggcaacatatcccaaaagcaccagttccttgtaatttccataatggtaggtttgtgcgtaagaatttccggaatccgtcaccataaataccgtaaacaaagcgaaatacaccaataagtcggaaatcatcccaaaccggtaacggatcgaccgcagaaaatccatttttatctcataccagaacattctaaacatctgcccgctcctccccatgatacagtttcttataaatctgcccgatttcttcctctcttccattctccacgacttctgcaaagcgcccgtcctttaggaaaataagcgtatctgcgacatccgatgcaaatgagaaatcatgcgcaatgacaatgatgcttctgccatcacggacactgcgtatggtatccgcaaccagctttcggttatcaatatccagtccgtccgtcgcctcgtcaataatcacgcattttgcgcctgtcacaaccgcagacatcagcgatacgatgcgcttctgcccgtacgagagcgtttcgaccagcttatttttcaccatctcatagattgggaatttctctttttcccaggcaatcgcggcatccgccgtacttttggacattcccttcagcatgctaaaatagatcagattctcatacaccgtatttttcacatacagatttctctcccccgaaagtatcacatcaaatccctgttcatccattccgtccgaaaaagagatcgtaccctcgtccggcagcataaagccgcacaaggtattgatgaacgtcgtcttccccgttccgttcggtgcaatgatgacatagacgcgatccggcaaaaactcaaatgtgatgtcttttaaaacttctttttccttaaagcttttctttacgtgttctacttttatcaagttatgctcctccctaactgattggccatatatccgttcgacgcatgcaagcatgcccgtccgtctttgctccatgctcacttttgccttcgcgtacattgtatcagattcttgcaaatgcagaaaataattttttctgattggatcaggtttactttctcccgtcttgacttttcttgtatttgattctaatatctttctgcacgctatgatatatgatagaaggatctcattttttcagggattttcgtgtgaaatagagaatacaaaagaggtgccaatgtgaaaatcaggagaaaacatccggtcagagtcaatcatctcgggagcgatcccatcccacagctggtgcgccggcttgcccttccggcaatgctcgcccagtttgtcaatgtactctacagcattatcgaccgcatgtatatcggaaatattgcagacgtcggggacattgcgctcgcgggcgtggggatctgtgggccgatcgtgacgatgatctccgcgtttgccgcctggatcggaaacggcggggcgccgttactctccatcaaatccggcgagcagaataaagaaggcgcgtccgccatcctcgccaactgctttgtgcttctgatcggcatggcagtctgcctgaccatcggcgcgtatctgtgcaaagacgccctgctggtatggttcggcgcgacggaacgcatttttccctacgccgaaacctacatgcgcatttacctgatcggaaccgtcttcgccgtgctctcgctcgggctgaaccagttcatcatctgtcagggattttccaatctgggcatggtctccgtcatcatcggcgccgttttaaatattctgctcgacccgctctttatcttcgccctgcacatgggtgtgcgcggagcagctgtcgccaccgtgctctcacaggctgcttcctgcgcattttcgctgtacattctgttccgcggtcccgtgccggtgaaaatcacgttccgcggttactccctcccggtatgccgcgatgtcctcacgctgggactgacgccgtttttgatcatcctgttcgacaatgtgttgatcatcgtccagaatgtcatgttgaaaaattacggcggcgccgacagcgacatgctcttaacctgcaacacgattgtgcagagcttcatgctgattatcacgatgccgctcggtggaatctccggcgggacacagtcggtgctcggctacaactacggcgccggcgacaccgcccgcatccgccttgccgagaagcatattttaaagacggcactgcttttctgcaccatcatgttcgtttttgcccagtgggatgtcagtgcaggcattttcgtcggattatttacgcaaaatgccgcttacagatctatgacggtgcattttatccacatctacacgctctccgtcataccgcttgccgtacaatatgcgctcgttgacggactgaccggcatgagtctcgttggcgcatcgcttccactctccttcttccgcaaggggatctacatcgcactggcagtctttttgccgattcgctttggcgcaccggcgatgttctatgcagaaccgctctctgatgtcgctgccgccgccgtcacgacgatcgtctttgtgaccgtcgtccccggactcctccgcaaaagagaagcactcctcggcaagcacatagaaaagtaaaaaggaacgcctgtcagaaaatggaactgtcgcaataagcataccgtactttgctctgataagtaatattataagaaatagatacttaaaagttccagataaacatgcggcggcaaattctgaccgcaaaatccggtatttctaaccatgccgcagctggcatccgtgatgatccgtgtctttccaagtttggaacactccacggactgtgtccgcaagccagcagacaattttaggacttttgtgtgtgtcccttgcggcaccagacaacagatccgctgtctgagtcggcatctgctattgaaaacagggcagatgccgactcagacagcggcttcgcgcggttatgttatgtttagaggtgcccataagggacacacacaaaagtcctaaaattgtctgcggattgcggacacacccgttgagtgctcaaaacttggaaaaacacggatcaccgcagatgcaaaaaccggttgtttagaaatgccccattttttgattcgaatttccagatgcattccagccgaaatcgaaggatatgatttttttctccctcctattacttcgcacgtcaaaaatttattctgaccggaagcggtgcctacgtatagatctggcggcagccgtcaatactttcgttggtggagtccgtgatatagcggatggcggcgtctttgtcgcggtcccgcacgtgaatgaaaatctgctccgcgctctcagcgagcgccgctgcgccgtacttgctggcgaagcgtacccacaggtttgtcaccagatccttgaaggaggcgaaaaacagcgggagcagcgaattgccgccgatgaaggaaagctcgtggctgaagtcaaagatcagcgatgcagcctcctcaggatcttcgcatgcctttaaggcggtcacatactgctcgagcccggcgatggacgcgtcatccgcattgtcgatggcgagcgtggcggcaagattcatgaacatgatgcggacttccagaatggagcgcacttccttgtcgcggagcataccgccgttgtactgcatgatggagaccagggtgtctgcggtaccgtatttgcggtagtcggcaacgaaggtgccgattcgtggtttgaccacaagaaatccctttttctccatctcgtccagaccggaattgacgacggcgcgcgatacctgcatggactcggcaagctcgcgctcaggcggaagttttgcgcctatctcaagctttccggataatatcattccctctaattctgcaacaaaaagctcctttaaagaaggagcacttaatttcttaaacaacataatgtgagcctctcttttctggtatatccaaataccacacagatattttagaaaaaaaacgaataaaatgcaagagataaagtctgaaatttttagaaagaatggcgggcgtgggtgtcatggacaaacaataggaagtatgataagattggaactacgggtaagacagaattgcaacagaatctatacaggaaaagagcatttaatatatgaagaaaaaggatcaggtaacagcggccgaagagcagaaggaagctgtccaggtaaaagggaaaaaacgccgtgcaagagaggcacagagggagatccgctgggaccgtctggacaatacggcgcatttgtttccggtgatagccggggagagcatgagcaatgtataccgcatcagcgtgacgctcacggagctggtggaccgtgaattgctgcagcaggcactggatatggtgctgccgaagtttgatgggtttaatctgcggctgcgccagggcgtgttctggtattattttgaggaaaacggcaagccggcaccgcgtgtgcgggaggaaagtgcgtttccgtgccgctatatccggcagaataagaaccacagctatatgttccgcgtaacctattataaataccgcatcaatctcgaagtatttcatgtgctcaccgacggtatgggtggcatcaattttctcaaggagctgacctatcagtatctgcggctggcacatccgaagctgcgcgaaaaggtgggagattccttgagcagcgatacctcgttgaaccgtgaggacagcttcctcaagaattacaagcacagctcccagaagggatatcagacgaagcgggcatatcttttaaagggagaaaagctgccgccgggagagttcggcgtcatgcacggctacatgaagatcccggagttgaagaaagtctgccatgcgtacggagtcagcatcaatgagtatctggtggcggtatatgtctggagcgtctacacggagtgcatgcacgggatgccttccgaacgtccggttcgtgttgcggtgccggtcaatctgcgcccttattttaattcgatcacgacgaagaatttctttgtgatggtgtcggcagaatttcatccgacaaaggagatctatacatttgaggaagtgctaaagagtgtcagtgagagcctgcgcagccagatcagccgggagaatctggagaagcttttttcctacaatgtctccaatgagaagcttcttgcagcgcgtatcgtaccgctgtttttgaaaaatctggcgatgcgctatgtatacacaacctctgcgcttgcaaacacagcgacggtgaccaatatcgggaatatctccgtaagcgaggagtatcgtccttatgtggagatgttccatgcgtttcttgccatgtccaaagggcagcacttaaagggaacgatctgttcctacggggatacgctggtattcagtttcagttatgatctgaccgacacgtcggtgcagagaggttttttcagaaaaatcgcggcagacgggattgcggttgagatagagacgaatggagtaaattatgagtagatgcaagcaatgtaatgtggaaatattagacgagacggagcgctgtccgctttgccattcggtgctggagaagacggttgaggtggaaaacatgtatccgaatgtgcggacgatgacgaggcgtctggcgttgcttagccgcatctatctgttcgtggcgattcttgtggaggcgcttttgatctatctgaatgtactcagcgactcggagatgttctggagtgcgattccggggctggcgatgttgtacggctatctggtgctgcgctatgccatattgggaaaatccggctacaagggcaagatcatcgtgttgacgctgatcgccatcctgatggttgtggcgattgacttcgtggtggggtaccgcggctggtctgtcaactatgcgcttccatccgccattcttttagtggatgcgggaattctcgttctgatgtgcatcaaccggcgcaactggcagagctacatgatgtggcagatttttatgattctctgcagcgttgtcccgctggtcttgtatgcggtggggatcgtgacggcgccgattcttgccttgctggcgtttgcattttctacggcactgtttttgggtacgctgatcataggagaccggagagcaagaacggaactgcggcgaagatttcatgtccgctgacgcggctgttttgctgtccggcggcgcagctgttttctgacagcggaaaatagaacagaggtacagtgaatgagagaaaatgaggcgagtatccgcggtagagtcgtgagggatctgatcgcgcatacgacgaatgatttgctgattgggaaaaagataaaaaatggggaactccgcaaacagatcggaacggcggaacctccgtggaagtgtccggaatgctttaccatgcagacgatcgagatggaacattttaccatggagcttttagagtcgaaggagaatgcgaaccgcgacaaaatcattttgcagctgcacggcggcggatatgtcggtgcgatgcgcaatgcataccgcatgtttgccggattgtacaatgaggtcagccacggcatgagcgtgctcacgccggattaccgcgtggcaccggagcatccgtatccggcggcgctcgaggatgccgtgtgcgcgtatgaatggctacttgcgcagggatggttttcggagcagatcattgtggcgggagattcggcgggcggcggacttgcgatggcactctgccactatctgatcaatcacggcagacagcttccgtgcggaatcattgccatgtcgccgtggacggatctgacggcaagcggggagtcttacgataccaactacgagagggatcccctgtttggaaagaccagggacagcctgatctacaatcgggattatgtgggagaccacgacccgatggatgaatatatatcaccgatgtttggcgatttcagaggatttccgccgatgctgatacaggtgggatcgtatgagatgctgttgtcggattctgtggatgtcgccgcgaaggcgagaggacagggcgtaaaagtgcgcttaagtatctatgacgggatgttccacattttccagatggcagcaaagatgctgccggaatccagaaaagcgtgggtcgagatcggtaaatttatcgagattctgctccgggaatagggagcacctgtctagtgcttagacaggtggctcacatccatgtatacaggcagaccgttgtgataggagacctgcgattcgccgagaatcagcggagcaagatagtcgagcagaggctgttcgatgtcgttgccggcactgttgatccactctctcggaacgctctttgcctcgttggcgatctggcggatttccgcataggagtaatccacggtatacggtgcgtttgaagtgcgctcgatggtgaccatggaagctgtcacaccctcctcggagagtgcgacggcttttttgccgagtgcgaaagattcgcctaagtctgtctgggaagccagatgtgcggcacagcgctgcaggacattgatttccacggaacgcaccttgacaccaagcttttccttgacaaggaactcaagtgtcttgccggcgccgcttaactgactgtgaccgaacgtgtcgatggactgctcggacgcgctgatgtaattgccggaggcgtcgcggatgccctcggacactgcgacgatgacattgttgcgctcgaaaaggagacgcttgacgtctaaaaggaaatcctccgggtcgaaagcgacttccggcagatagattaagtgcggggcggtgttgtatccgttgcgcgcgagtgccgcggcagcggtcagccatcctgcgtcgcgtcccatgatctcaacgatggtcacgcttttgaccgcgtagataaaggtgtcgtgcgcgatctctaagagcgaggaggcaatgtattttgcggcagagccaaagcccggggtgtgatcggtctcgcagagatcattgtcgatggtcttcgggatgccgataatgcggacggaactgccgatgcgttttccgtactcggacagctttaacacggtgtccatggaatcattgccgccgatatagaaaaacgcttcaatgtggtaagtttcaaactgcttaaatatgaagacatagggtgaatcatcatccagataatggggaagtttgtagcggcaggagcctaagtacatcgcaggtgtctgcgcaaggcgggaaagatattccggatgaccgtccataagctccgtgaggttgagaaggtcatcgtttaaaataccggtgattccgttgagcgagccgtaaacggtgtcgtacatggaagaggcggacacgccgtcaatgacaccggcaagacttgcgttgatcgcaacggtaggaccgccggactgggctaccatacaatttttctgattcataacgaactccttatgtgtaaatatatcaatgtcagattgttccgaaaatggtcatttcggaaatcaaacattatcatacccaaaatacgcgggattatcaagattgaatttagatagaaagagacggacggaaagatgaaaatgtgtacattgtgtcctagaaactgcgcagtggaccgtgcgggcggagagcgcggcatctgcggacagaccgaacagctgaaggttgcgcgtgcggcgcttcattactgggaggaaccctgcatctccggggaaagcggctccggcgcggtatttttctccggctgtgccctgcattgtgtgttctgccagaaccgcagcatcgcaaacgggacggcaggaaaggagattaccaaggagcgtctggcagaaatattcctggaactgcaggaaaaaggggcgaataatatcaatctggtgacgccgggacattttgcaccgcagattacggaggcattgcgccgtgcaaaaaaggaaggactgcggcttcccgtcgtttacaatacgagcagttatgagagtgcggatacgatcaaaagtctggaaggacttgtggatatctacctgccggactttaaatatataagtcctgcgctcagtgcaaaatattcacacgctccggattatgccgacgtggccaaagcggcggttgcggagatggtgcgccagtgcccgagacccgtgtttgacggagacgaagcagaagacccgatcgaggagggacttctgatgagacagggcgttatcgtgcgtcacctgctgctgccgggctgtaccagggactctaaggcggtgataaaatacctgtatgaaacctacggcaatcagatatatctgagcatcatgaaccagtatacgccgttggaaaatgtcagcgcctacccggagctgaaccggaaagtcacggacgaggaatatgaggaggtcgtcgattatgcgatcggactgggggtagagcaaggatttattcaggagggggagacggcagaagagagcttcatcccggcgtttgacggcgaaggcgtataacgcatagcagaaaaacattgtatagagataaagataaaggggggtgtcgcacgaagcataccgtgctttggtttgataagtaatattatgagaagaccgcaccgtgggatttcagatggaaatgcaggtggaaattcggttcaaaaaatgtggcatttctaaccagccggatgtttgcatctgcgatgatccgtgtctttccaagtttggagcactccgcgggtcatgtccgcatcccggagacaatttgtaggaccttcgtgtgtgtcccttattggcacctctgaacaaaacataaccgcgcgaagccgatgtctgagtcggcatctgccttattttcaatagcagatgccggcgagtttcggttcgcgcggttttatattgtctgtgaagaggtgccattagggacaccagaaagtccgcccattgtctccggtgtgccggacatgcacccgtcggattgtccaaacgtggaagagacacggaatccgatgcaaacattcagccggaagaaatgctcacatttttctccaacgaatttccatctgcatttccacatgaaatccccaagtgtgcttcctgtaatattacttatcactcccaaagaggtctatgcttcgtgcgacaatttttgtcctgtaaatatgggtttacataacatgtgtccaaagaattggacacatcatgtgcgatactgacaccatcaaagcggatggggagggaagaacatggagaaaaagatcgagatcattgccgtcgattttgacggaacattgtgcagtgaatgttatcctgccatcgggatgccgaatctgccgctctttgcattgctcaagggtgcgagaaggcagggcaaaaaagtaattttgtggacatgccgctgcggggatctgctggaggaggcggtggcctggtgcagaatgttcggactggaatttgatgcggtaaatgaaaatgtggcgcagacgttggaacagtatggaacggaatccagaaaaatctccgcggacgtctatatcgatgacaaggcgtgctggccgtggatgacgaagcaggagtgggaacggtatctggcaggttagaaaaggaggataagaagatgaaaacagtagatatggaattgatacttttgtgtgcgcttatggcggcgattggagcgttcggactggtgacgggtgtggtgctgctgttcggaatccagtttcaggagtgcaatgctgcactgctcaccggaattgtgtgcgggctctggggcatattatggggaagcctgctgatacagaaccggaacctggtgtcgaaaaacgtctaaatatagtacagcgtgcaggaaaatggctatatttaggttgacgcgtgtgatagaatctcctataatgagactgaattattgggcgcatgattttatggatttatgcggtactcagggaggaattcgatgaaccactttatatatagaaagaagagaaagatattgctggcggcaatcagcatgggagtgcttgctgccagcatatctgcttttcacggacccgaagccgtatacgcgtacacagcgacggcgggaacgatcaacgacggaccggtgaaggtgcgcaacgcaccggtgaccggggataagctgacactgctctatccgggaaatgcggtgacagtaaccgatgagacggcaggatcagacgggtatacatggtgccagatccagatgtcggatggtgtaaccggttatatacgctcggattttgtgacgcttcagggcacggattcttctgcgggacagacgaatgcggacagcagtgcaggtgggacaaacggggtggtgcagaacacggaaaaaggtgtttatgtgcgctcgggagcgggaacgtcctactctgtggtgacaaaggtatacaaaggacaggctgtgaatgtgggcgagctggtctcggcgggcggaatgaactggtacagtgtgacgctcgtggtcggaggcgcctcctattccgggtggatttgtgcggactatgtagccgtgaacggtcagacgtcagacgaccagtcgcagggagagacgaccggtgccacggacagcgagtatgaggcggcgcttgcggcagcgggttttccggcaagctattgcagcgcactggcatccctgcatcagaagtatccgaactggcagtttgtgccggtgcagacgggacttgactggaatacggtggtatcgaatgagagtctggttggaagaaacttgatccagaattccgtgaatgacgcaagaaaatcgacggacagtcaggcgtataactgggagaccaacaagtggtacgggtttgacggggcaagctgggtgtcggcgtctccggaatatatcgcatactgcatcgatcccagaaattttcttaacgagaatcagatctttcagtttgaaacgttggaatatgcaggctatcagaacgcagcgggtgtgcagagcgttctttccaatacatttatggcaggcaattataccgatacggacggagcggttcgcagctatgcggatacgtttgtggagatcggctccaatgtgggcgtgagcccttaccacctggcatcccgctgtaagcaggagcagggcgtgcgggggacgagcgatctgatttcgggacgatattccaactatgcgggctattataactactttaacgtccgtgcgtttacgacgggcagcgcgtcggcgattgtgaacggactggaatatgcgaagttgcagggatggaactccatctacaagtcgattgcgggtggatcatcggttgtggctgataattatgtgaaaaaagggcagaataccatttactttgaaaaatttaacgttgtctataccaatagtctttacgcacatcagtacatgaccaatgtgcaggcggcgatgagtgagggcaccaatatgggaaaagcctacacggacaagaaccaggcgtttgttttccgcattccggtctatcagaacatgccggagagcgcagtgacgtttgcggacaaggggaatccgaacaactggctttcctcgatcacggtggacggatatgcgctgacaccggcattttccggtgcgaatacctcctattccctggtcgttccggacagcgcggcttcgatcaatgtgggagcgacggcggtggcgggaacgtcaaccgtttccggtactggaaattattcgctgaattatggagataatacgattcagattacctgcatctcgcagagcggagattcgcgcacttacacgctgatcgtggcaagagcggggggcagtgccggcggaaccattcaggtggcggatgacgcggcgattacgccattctatccgatcggaacctatgtgacgggaattgagcctggaacaagcgcatccacagtcgcatcgggaatcggaacccagaactgtaccgtaaagattctgaatgcagacggcagtgagaatacacagacggtgggaacgggcaacaagctggcagtgtatgtcggcgacacgctcgtgcagcagtatgagattgtggtatatggagatatcaacggtgacggaaaggtttccaatctggatctggtattgatgcagaaacagatccttggaattgaaagtcagtctggcagtcgtctggaagcggcaaacgtcagcaaggacggcggtatttccaataaggatctggttattttacaaaaacacatactgggaatctcacagattgatcagtgagaggaagaattgggagagcagaaatgaagaaaaaaatagcaatgatgatgatggcgcttagcctgacattcggggttgtcggagtgccgcagacggtattcgcggcgagcggatcaacatctgtctcggtgtcgtcaggaagtgtcaatatcggtgatacggttacagttacagtaaaagcgagcggtccatccggcgaaaaggcgaatgcgaccatgacgctgtcttatgattcgagtgtgctgcagtttgtgagttgcaataccacatacggcggaggcggcggaagcgtgatggcgacgggagaaagctacacggtgacattaaaagctgtgagtgcgggaaattcctccctctctgtctctgccaacgacggagtgatctttgactccaatgaggagatggattccatgtcgggcagcagtgcatcggtcacagtaaagaatgcagcaagtacaaatacagattcaggcaataatagtagcagtaacagtggaacctccaacggaaacggaacatcagcgggtggaaacggggattctgcggcgaatactggagagacaacaggaaaacagtctgcggataattctctgaaagagttgaccatttcaccgggaacgctctcgccggcatttaacgggaaaacgctgacttatagtgctacagtgggaagcgatgtaaccaatatcgccgtatctgccacaccggtcaatgaaaaagcggtcgtggagtcggttacgggaaataccaatctgaaaagtggagataacaccattaagattgtagtcaaggcggaaaatggtgtgaccgcaacctataccgtgaatgtgacaaagcagggaacctcgtccggagagacaacggcatccgatgagggggaagtggagacaacagaggagacggacagcagtgaaaacacggttacggtaaatggcatttcctatgtaattgcagaaaattttgcaacagagaatattccggcagatttttcggagacaaccgtcaattatcagggggcggattatcggggcgtgagttatgacaagggatctgtggtcatgctttatctggtgcaggacggagcggaagagagcacaggaagcttctttgtatatgacagcacaagaggtaccctgtatccgtttgtaaaaatggtcaatggggaacactacgtgatagcgcttctgccaccggtggattatacgatgccggatacgatgcagcagacacagcttacgctggcggacggaagtcttgtgacggcatatcaggagacccaggaggaagggtctgaggtggaatcggagttctataccttttacggagtgaattctgacggaacggaaggctggtaccagtacgactccatagaggagacctatcagcgcgtaaatacagggacaactgtatcttccgacggactgcaggacgaggatgcggcctatctgcaggaggaatatctggcgctgtccgagaaatataaaaaagaaaaagcgttttccagaaccgcgattggcatattgatatttctgctggcggtaatggcagtggtacttgttaacctgttactgcacaggagggaagcggatagagatgacctggatgaggatgacactatggatgacggtgtctcagagcatgatgatacagaagaactgctggatgaaaaccaggatgatgtgatcgaggaaccggaaaaggattcccggaaaaagtggcactggaagaagcgctctgctgcagatgccggggatgcagatgaattcgacgaacaggaagagagagaagagaaaacgaaaacgcaggaatctgacgatgacgcgttcgatgatgcattcgatgaggatgacatcgaggaggaagagccgccgaagaagagattcggtttctggaagcggaagtctgacgatctggatgacgatctgtttgatgatgacgaggatgcgtatgaggatgaggacgcgtacggggacgacaatgacacgtacgaggacagcgatgcgccggacgatgaaaaagtttcgggcggcgaagaaaaggctgccgcgcgcaaaccggcgggcgatggcagaaccgcaggaagaaaagagcgcaggaccagggcagcggacgaagatgcagcggacgaaccggagaatgagccactgtatgaggaaaagcacccgaagaagaaaaagagcggcaaagaccagaaaaacaagcaagacgatgagctggatatcatagattttaatgatctgtaaagacgaatgtgatatcggactggaaataggaggtagcgatgcagacagtatatacagcaaaggcaaaaaaggcgattgatattgcaacgcggatatcaaagtcattgcatcacagttatatcggcacggagcacatactgcttggcctgttgaaagagggaaccggtgtggcaagccaggtacttgccgacaatggtgtagagtatgataaggtgctggaactgatcgaggagctgattgcaccggggaatgcggttgcggttctggaggacggattgtccccgagagcggcgcatgtgcttgaggtatccaaagcggaggcggcgcgtttccactcggagaagattggaacggaacatcttttaattgcgatgatcaaggagacggaatgtgtggcgtccagactgttgaatacattgtctgtcaatgtgcagaaaatgtatgtggacaccctgatcgcgatgggcgaggatgtgagccagtataaggatgaattccagaacgggaaacccggcaagcggaaaaacgcggagggaacgccgtcactggatcagttttccagagatctgaccgaacttgcacgcgacggaaagcttgatccggtggtcggcagagaggcggagatcgaccgtgtcatccagattttaagccggagaagcaagaacaatccgtgcctgatcggagaacccggcgtaggaaaaacggcgattgtagagggaattgcagagcgcattatgggcggaatggttccggatacggtgcttggaaaaagagtggtctccctggatctttccgggattgtggcaggctcgaagtacaggggtgaatttgaggagcgcatcaagaaggtgcttgcagaggtggcgaaagccggaaacgtcctgctgttcatcgatgagattcataccatcatcggagcgggcggagcggaaggcgcgattgatgcatccaacattttaaaacctgcgcttgcgagaggtgaggtgcaggtgattggtgcgacgaccatcgaggagtatcgcaaatatatcgaaaaagatgccgctctggaacgtcggttccagccggttgttgtggaggagccgacggaggaagaagccatttccatattaaagggattgcgcggacagtatgagagccaccaccatgtgacgattacggatgaggccgtggaggcggcagtgcgtctttctgcgcgttacatcaacgaccgtttcctcccggacaaggcgattgacctgatggatgaggccgcggcaaaagtgcgccttcacgtgggcggagacccgagggaggctgcagaactccggcgggagattgcggagtcgcaggagacattggagcaggcactttctggcggagacctggaagcggcgagagaggcacagacaaagcgtcaggaactggaagaaaagttggaaaaactgaacgcaaaggcaaagcagggcggcagacggcatcaccagaccgtcggagaggatgagattgccgatgttgtgtcgggatggacgaaaatcccggtgaagaagcttacagagggggaggctgccaggcttaaaaagctggaggcaactcttcacaagcgcgtgatcggacaggaggaggcggtatcggcagtggccaaagccgtgcggagaggccgcgtcggattaaaagatcccaagcggccgatcggatcgttccttttcctgggaccgacaggcgtcggcaagacagagatatccaaggcactggcagaagctgtctttggacaggagcaggcaatgatccgcgtcgatatgtctgagtacatggagaaacacagcgtatcgaaaatgatcggttcaccgcctggatatgtcggacatgaggacggcggacagctgagtgaaaaagtgcggagaaatccatacgcagtgattctgtttgacgagatagagaaggcgcatccggatgtgtttaatattctgctgcaggtgcttgacgacggacatatcacagattctcagggaagaaaagtggactttaagaataccatcatcattatgacctccaacgcgggagcgcaggcgattgtggagccgaagaagcttggctttgcttccggcaatgacgagaagcagaactacgagcggatgaagggcagcgtgatggaggaggtccgcagaattttcaaaccggaatttttaaaccgtattgacgagaccattgtattcagggcactgaataaggacgacatgaagcagatcgtaggtctgatgacaaaagagctggcgaagcgctgcgaaacacagcttggcattacgctggtcgtgcgcgatgccgcaaagcagtacattgtggataaggcgtatgacccgaagtacggagccagaccgctgcggcgcaagattcaggatgagattgaggatccgcttgcggaaaaacttctcgacggaagcatccgccggggcgacgaagtgatcgtcacgacgaagaaaaatgcaatttttctggagccgaagaaaaagtaaaaaattacttaaatgtcagtgaaatcactggaaatcaaagaacagatattatataatatttttacaaatttacgataaagcagaccggatgaaggagctgcaatatcacaggaggataagatggccgttattagtgaattactccgttcagaggaggatggaacgatcagctttggggattatacattgagcaccaaggcaaagcttgacaattttgagcaccagggagacctttacaaagtaaagacctgtcaggagattaccaagctggagcgcaatggcatgtttgtatacgagtctgttccggggactgcagtggagcatttaaaagcaacagacacaggaatggagtttagcgtagaaggcgcagaggacgcacaggttaccgtagagcttgaggatgaggctgagtacgacatcgtgatcgacggtgcagatgccggcaggatgaagacgaatctcggaggaaagttaagcctgagcgtagagctcggcgatgctccggtaaaggtaagcgttcagaagtgctagagcagccgctttcgcatatgacaattacaagatcagtgagacctgtccgtatggacaggtctttgttgctctataggaaatgacgtgttatgttaaagcgcgaaagccgcgctttctatggagaaaaaagccctgtccgggcagcagccgcgtctgcgggaaaggaagataagaacatggcaaaaggaaaaacaacagtgtacttctgtcaggagtgtggatacgagtcggcaaaatggatgggacagtgtccggcatgccatgagtggaattcgtttgtggaggagacagtcgagaaaaagagcgcgcgtgggaaccgcagtgcggatagcagccgtgaggcaaaggcagttcccctgtcacagattgagatgacgcaggaacagcgggtgtccaccggcatgaaggagcttgaccgggtgcttggcggcgggattgtgcagggatccctggtgcttgtgggtggagatccgggaatcggaaaatcgacgctgcttttgcaggtatgcaggaatcttgcggaacataaggtgaaggtgctctatatttccggtgaggaatccttgcagcagatcaaaatccgggcagaacgcatcggaacctttggggacagcttaagtctgctctgtgagaccaatcttgataccatacggcgcgtgattgaccgggagaagcccgagatcgtcgtgattgactccattcagacgatgtataatgaagacgtctcgtctgcaccgggaagcgtctcgcaggtgcgggaatcgaccggcaccctgatgcagatcgctaagggacttggaatttccatttttatcgtcggacatgtgacaaaggaaggcgtggtggctggtccgcgtgtgctggaacacatggtggatacggtgctctattttgagggggaccgccatgcggcgtatcgtattctgcgcggtgtgaagaaccgctttgggtcgacgaacgagatcggtgtttttgagatgcggggagatggtctgacagaggtggagaacccgtcggaattcatgctgagcggaaagccggagggagcctccgggtctgttgtggcatgctcgatggaaggaacgcgaccgatccttctggaaatacaggcattggtctgccacagcaatttcggtatgccgaggcggacggcggcaggaaccgattttaaccgggtgaatcttctgatggcggttctggaaaagcgtctgggactttcactgggaaattgtgatgcctatatcaatattgcgggaggcatccggatgaatgagccggcaatcgatcttggtcttgtgctggcgattgtctccagttacaaagaccgcccgatcgatgagaagaccatctgcttcggtgaggtgggactcagcggtgaggtgcgcgcggtcagcatggcagagcagcgtgtgctcgaggcgaagaagcttggatttaagacatgtattctgccggaggtgtgcagggagagcctaaaggagatcaaggggatcggtcttgtcggcgtgcgcacggtaaaggatgcgatggattacgtgatgcggtagtccgtaggaagggaaaatgaatggttctgaattgtatgtacaattaaaacaattcagaaccgaaaactttcttttttaaaacggcggaaatgtggttgacattctaaaataatgatgataatataaacaagctgaccgcgagaacagcggacaggcaaagcgcttctgaaaaagaagcaaaagaaaaataaaaaagttgttgacaaacggttgatggtatgatataataaataagctgccgctgagagatgacaacgatgaatgagattgaaaaatccgttcggaagttgcggagcaacttctaatgacagcgcgaagcgctggctgtacattgataactgaacagtgaataaaccttgaaagatcctaaatttcaagctgtcgatcaagagattgaaagactttatctttcatgctgattgcctcctttttcggtatgtatgaattatagcatgtacctcacataattgcaatatgcaatataataattatttttaaaatttcataacgcttgacaacacaatataaaaccgctatactaacagcacaacaaaaattgcataatgcaattcataaggaggtgacaagatgacggaaagaaagattgcattatccatcgaggaagcagccgactatacaggaattggcagaaacactttgagaaagctggttgaatggaagaaacttccggtattaaaagtcggaagaaaagtccttattaaaactgacattctggaaaagttcatggaagccaacgaggggcgagatctgagggataaaggaaatgtaaaaactgtcacaagaaatgtggcaacttaaaaaggcggcttcctacgaaaccgccaaaggttctatcagaccgaagccatgatatacctacacgcaagaggattataccatgtgcttctcctgatatgcaaccgggaactaatgtttatcttgtcggaaaaacatcgacaagataatgctccgcaaggatgcatcacgattctgattggaattatgtcaacagagctgaccagaatcgtgtgccaaatcttagcagagcaagatttgattataagagaaaggatgaagacgatatggcgaaatcaacaaagacttatgaagaaagaatacgtgcattagagaaaaaggaacaggaaagcatcgaagctaccaaaaagctcattgcacagcgaaaggaactggaaaagagaaagaaagccgaggaaagtaaaaaacgaacccacaggctctgtcagattggcggtgcggtggaatcggttcttggctgtccgattgaggaggaagatttaccaaagttgataggcttcttaaaaaggcaggaaacaaaaaaattattcgatttcaagcaatttttaaagacacggtggaatttacctgtgcactggaatttaaaatttcaagtcagctaaattcactgtatgatgcatatgcttcaagtcttgcagcttgtttcaacttatccagttcttcttcactaaccctaatactcatagaaattgtcttgttcatttcaaagccctcctatgttcaaaatcatatcatctacgtgcaacatttgcaatacgaatcaccacgtttcaacataaaaatagcaggtactttttcacctgctactttcacttctactattaattttggcttttaaagttcttatgtaataattatttttctcacaaattattttccataatttccaaataattttccggaaatccaatcagatccaaatcaatgtcatccctatactcatctatcacggttttcactgtttgaatcaaagattttttactactttcatccggaagtcttttcagtaaaacaagcgtatatgcaaataatgagttgttctttatttctggatgctttctcaaaaatgatgacgtaaattttgccggaggattgaaatccgtgttatacattcttgctgcatgtgcacatttatttcgtaataccgacagacaatgaagatgattttctagtgtatcctttccaacaccaaccataccagcaatagcatctttttctgagtaatacatagaactgtatagcttagacatattagagaaagacattaattctacaataacccacaacggcattttgctggaatattttatcttgtgatgtttcacaatcagactatccttataataatttttctccctactgaaactttccataacttccttgtaaccctttttgttatagaaattattttcatcgtaatgctgatcatacggagcttccgtacatttgactattgaaaatccatatgctatctgcgtcctataatatacttctgccttttcaatataccgccgaaatgtatcacgcaatatttcatctactttatataaatgatacaccgtttcaaaagtagttttttcaatataatcactaccagaaggctcttgtctgaattgcaaagcataacccgtaaaacgataataatttactctttttaaaatgtcttttgctttttctctatcagcgacaatcatcccgtgagctattaacttatctaactgttcatcaaaggtcaatggttttttcaaatccataaactctctccttaacgtaaaaaagctgagcacacgtctcagcttggtccccaatgtcaaaaagacttcaggcaactctgttacatatagtatattcaaagctctggaaaattgcaatactttttataaattttccacatctccatcaataaaaaatctactacattgcctgtaagtagtcccttactactaaggaatcctcccaacacctttgcctttatcccacttccaaccatgagccttagtagtctaaaccgcagtaattccaatgctttccgccatattatgtcctactctgccccaatctgtgaaggtatgcattatcataaaactggagtgccgcggcagataaaaagtatttttatcatatatataaatctcccgcgatgtcgaaattttcctttatttctgggctttctgtgatttcaccgtgacattttcctctttgtatatcttgtcataagttcgcatatctttgcacattttcatcatcaaaagttgcaaaataagttgcactttacagagtggttgcattattgattctctgcatttcctgttgtatttctttagtggcttttcaaaacaattacaggtctataacaaaaggaagtataaccgtttcccaatgcgtccacttggctgaaagtcaccacagactgtcctaaaggattttattgagtttggtgtaacatatgtttgacaaacccacattcagaatatcacgtatatcctcttttattaattgattataaataatttttcgtctatacttaggagtaaatacaatatggtatttacacatccattttgtatgggcgagatcattagacttattcgccataaaacacctttcctttcttgcaatagtgactgaacaactctattgtaacggaaaggtgtttttctgtataacgatttgactccacccgcatgaagcaggctaaagcctaatgactaaaagacctcaccagacaccaattcagtgaggtcatataatcacgctttctgtttcggtacaaactcaatcttaagagccattcccattccatctgctaatcttttaagcaaattgacagaaggatttcttgttccattttcaagcttactaatatcagcctgattaataccagtacgctccgcaagctctttctgtgtaagattctgtgatgttcttgcatctacgatagctctgataacatccatctctggctgaattgcttcatactcttttctaaattcttcatccttcaactgattagaaagcatatcatcaaatgttctcatccttcatcaccctttctatgaaatcttttcttctatcttttgcaatctgtatctcctctttgggagttttctgtgttttcttaacaaaaccattcgtcattataatttttccctcataatagaaaaaatataatactctggtaatatcgcttccgaatttgcaacgtagctcaaaaataccatcttccagatgcttgctatatggttctctaagcatatttcctttttcctgcaagattcccatcaaaccatatatcttagccctcatcttgggatgaacagaattaagaaattcctctacaggaacttctccgttttctttttcatatgcaatcaattcaaagtccgtcattcaatctccttcgtaattattatatggtatatatgccatattgtcaattatccatttaatccaatcataccggcctataaactacgttttatgttttaaaaaattctctcctttccatcacttatcgtaatttttttcttgttattacctaaaacctccaccccatcttctcctccccaatcacaaccagctctttgccacacaatgctctcaactgcagataaagactatcccacacctccccatcttccatcaccaaaagtggtttgggattgatccccggcgttataaggacagcgctatatatttcagtatattttacattgatttccactatttttttctcagccgcctgtctgttaaatggttttgtttgacagatttgcgctgttgaaaggatgtctttctccaattccgtaattaccctcttatgttttaaatattccaaaacttcctccagcaccttatccattttctccatatacgccaccttctctttcctaataataaaaaattttgtcatatcgcatttgtcgaaaattatcatattccgtcggcatcctgcaaaaagtccccagaatctccccctttctaccgatgccctaaaatatcccctgcatcgtctctcccattaccagacaaaaggcatatcctctttcaggattccttccctgcggcggattgctcctgcctcttgcgacatcctttgtcatcgccacagtgcgctccccgcggagccttttacttcatagggcgcattttcctataaagtaaaaacgggaaatccgatcattttccatcggacttcccgtcattcttcttatcctattttcccatcccctactcataatcgaacttcccgtcgtttttctcctccagcgccttaatcatatggtaggtaaactcattgtacggtgtcgggatccccagttcacgccccatgcgcaccaccgcgccggcgaacatgtccacttccgtgtgccgccccgcatccagatcctgcagcgtggaatagcgcgcccgatcccgcaccttactgccgaaggtggatgaggtatcagccttgtcaaaatcgatcccctttttctccgcgatccggtccacctcttcccgcagccggtcccgcaaaaatgccacatgctcactgtcacggtaggcgcccaccccgcagcccaccatcgcctgtgcctggttgttcggcacgttgagccggaatttgctccagatctccgtgaggataacgtccgtcgcacggtaatgcagccctgtatccgcgaaaagatcattcagcgcctcaatgcgtccggtgcctctgctaagatccgcttctccatatataataccgatggtcgtctccggatcaaaaaccacctgattgccctttcgctccgaggcaaccttgatcagtgaatggacaatttggaccggatcaatgatctctccgatgatctcctcgctgtccacgccgttcatcagactcatcactgtcgtgtgttcgctgaccacggtctgaatatcgccaagtgccgagcgaagtgcctgatacttggtggcaacgattaaaagatcgacaccggcagcctcctccggcgtcctgacagcggggtggtatacctgcccgttaatgacaaagccatccctctcatagcgcgccttccgctctcccgatgcgactacgcacagatcaatctctttcttttttgcaagcccccacatgacataagaacccactgctcctgcgccaagaatggcaaccgactgatatttcattgctttaaccctctttcttctgatacctgcttatcatttcctcactccgctaattatgaaagcagaaaatatttcatataaacattgccaaagatcaacacggcagctgcaacgatcagcacaatcagtccgaaaacagcaatttcctttaacatgctgtgttttttctcaaaagagtcgttttcttcctggtcgatcacttccacgttatccattttcattctttgatgatctgtaacatttccctccgtctgtctttgatctacagcccgcagaaaatcttcttttgcgtgggttgcatgcatactttcctctgtctgccattgatctacagcccgtgggaaatcttcttttacgcgggttgcatgcatactttcctctgtctgtcttcgatatacagccagtggacccgagatatgcatgatcttactccggaactcgaaaagccataaaacatcttcttcactgcagggataatcctcaaacgaaccttccccgtgtgccatctgattccttatatgtcttagttctctaagcctgtcatatgtctgattccattccggaatcctgtttctctgcatgaccggaacagccatcatatcattcagataacatgtaacgccgccgctgtttataccgtacatttccgaacaaagtttatccagctttttatattcatcaaagaaaatgatacttgtattctctggcacgttctgtacctcctacctcttctcccgcagctttttcagataagcattcttcacttcattctcatgccggagtcttccgatctcatccttcagatactgcacatactctcttgtcagcttcacaccgccccggaccgccacgtcctcatgctgctccatctcatccagccactgctgcagcgatttatcccggatatcattaaacgtcgtatcttccttaaaaaacatcgctctctccatttcctgcattattttctgcaccttcgcatcttccagttcagaccgcaccgcttttctgcgcattcgcatcttccagcccagaccgcaccgctttcccgcgcatctgtatttccagctcagaccgtattatttttctgtgcatccgtatcttccagctccaaccgcatcagcacgagttcctgccatctgccgtcgcgagtcagaaagccccgcggatttcttccatattccacaaacccgtacttcttatataatctcaccgcggtctcattgtcaccgaccacctcaagttccagctgccggaacccggcttctttcgcgcagtcaatgcaggcgccggtcagcgccgcgccgattccctgtccccagtattcccgcagaatactgatgccgaaatccgcgcggtgccttagcttctcgcgcgtactaagcgcatggtttcccgccgatcccacgaggatgccatccacaaatgcacagatctcaatctccgtgcggctcgccttttgcgcggcaagccgttcttccatgtcctccaccgagtgcgtcccttcgtccgcatacgttgtcagaaaatctgtctccgcgtgtgcctgtgtaaaataatgcagaaacgccgccgcatccgcccgttccgcatttttcaaaagacattttctttgatcttttaagctgatctcccggtaatataacatattgctcctctcccgcttttgcgcagcaagcctctcatcaaacctcatttgtcaccgagtatagcacactcctacgcaaaaagaaagaacgcactcctggacacatcagaacctactttgctgcacacgcacgtaattctgcaatctgcttctccgtcagcggtaccgtcggagaattgtcatcacaggtgttcctgttttccacaattaaacttgtgtctgttatcctttcttccatgcgagccacaatcgcattcacttttttatctccacatccatctctctctcctttccctccacaaaaaactgccctgtttttctatttttattagtaagaaaacagggcagtcccatacacagtcttctgctccttgttgcagtacgccatgtgcatgtcattgtagtatagttcaattccggaaaacaccgggtacacggtaacttttccggttcccgtcccatcctccgtttccactctcttcccgtctgatcaggtctcatccaaacaatatttttcatctgttctaaatcatggtatactggattgcagcgtaaagcaacaacaaatccgcgcagatacataaaggaagtttatcatatgaaacgaatcgattttgaacatggaaccatcaccggaaatattttgggagccgcccttcccatgctggtcgcacagctcttaagcctgctctacaatattgtagaccggatctatattgcccgcatcccggatgtcggcaccacagcgctcggcgccgtcggactctgttttccaatcattgtcatcatcaccgccttcagcaatcttttcggcagcggcggcgccccgcttttctcaatcagccgcggcggcggagataccaaaaaagccggtcagatcatgaatacctcatttaccatgctgtgcgccggcgctctggtgctgatggcagccggcctgctgtttgcagcgccaattcttaagctgttcggcgcctcggatgccgccctgccatacgcctatccttacctgatgatctatctgctcggcacgctgccgtccatgattgccaccggtatgaacccctttatcaacgcgcaggggtactccgtcgccggcatgctctcggttgccatcggtgccgtgaccaattttctcttagatccgctttttatttttgtctttcatctgggaatcaccggtgccgcacttgccaccgttctctcccaaacgctgtccgcgctctatgtgatccgctttctacaccggcgcgcggaatataaggtgcggctgctgcgcccggctgagtggaaatccagtctggtcgaagcaaaaaacattataagcctcggcaccgccggatttatcatgcagctcacgaacagtctggtatccattttctgcaacaatgtcctcggtgcaaccggcggcgacgtctacatctccgtcatgaccatcatctcaagcgtccggcagatggtggaaacaccgatctacgcgatcaatgagggaacctcgccgatcttaagttacaattacggcgcaaggcgcccgagccgcgtgcgaaaggcgatcacagccctcgccgtcctgattctgctctacaccgccgtcatgtggagcagcatcatccttgccccgcgggcgctgatcggcattttcagttcggatgccgcactggtcgctgacgccatccccgcattaaagctttactttgccgcctttattttcatggatctgcagtacatcggacagaccgtcttcaaatccctgaataagaagaagcacgccatctttttctccctgctgcgcaaagtattcatcgtcgtgccgctgacctatcttcttccttatgctttcggcatgggaacagacggtgtctttgccgcagaaccggtgtcaaacgtcatcggtggaagtctatgctttataacaatgttgtttacagtgctgccggaattaaagcggatggaaaaagaagcgtaacccgtttctccctgctgtctttgtattcagacacactgcattcatctcctatgcttcttcgtactccgccagctctgtctccgtctcaagcatccgctccagcagactgtcctggttggcttcctccgcatccacagcgctctgcagttccatcagcttcggataatcactcgcaagcgccggatctaacatctgcatctgaagttccgccagcttctcctcgctctccgcaagcatccgctcatacttttccttctgacgctgcagccgtgagcgcaccttgcccggattgtaataggccttcttgtcaaaaacatccgagagcgtcggaacactgccggcatccgccgctcctctcacatcggctccctgtcccgcggcacttcccgcgttccgccctgcggcgcttcccgcattcgctgccacgccgcctgcacacttctgcttctctgcgagatattcctcataattcatcgcatactgcctcacggcatccccggaaaattccagaatgcccgtggcgatcctgctgataaaatagcggtcgtgcgacacgaacagcaccgtgccctcgtactcgcgcagcatctgctctaacgcttcttttccgatgatgtccatatggttcgtcggctcatccaggatcagaagattcggtctggtctgaagcattttgcacagtgcgagacgcaccttctcccctccggagagctgccccatttttttctccacatcctgcccggaaaataaaaagccgccgagcgcgctgcgcacctcctcgcgcaggtaccccggatacgctgcccagaaattctcaagcacggtctgttggggcggtgcctgctccatcaccgctttctgctggtcaaaatacccccactccacgttctgcccgaatttgaagctgccgccaagtgccggctgttctccgatcaacgtctttaataatgtagattttcccttgccgttctccccgatgatcgccagacgctcctttttctgcagcaaaaaagacacctctgccagcggtgcatcatagccgatggagaggtcttttgcctgaatcacattggtgtagctctcgatacgcggcgtataccgcccgtgaaatgcgcgcgtatcaaagcgtctcggcttctcaatcttcaccatgtgctcgatcgccatgcgttttgagcgcgtcgccgccaccttggtcggtgtgttcttccacttttcaatccagtccgtcagccgtttgatctctttctgctgttcctcgtaatccttctcctgcttgatgagatcctcctgcttgcgctgcatgaaatacgtgtagtttcccggatagcgcttcatctcgtgatactcgatctcataggtcacatccgccaccttgtccagaaacatccggtcatgcgacacaatcacgaccgctttgtcgtagcctttcagataattttccagccactcgattgtcggcagatccagatggttcgtcggctcgtcgagcagcatgatatccgggcgcgtcagaagcagctttataaacgccactttcgtctgctgccctccggaaaaactgccgatcggacgccgcagatcctccagtgcaaatccgaaccgctggaacatcgtctccatatccctgcgccaggaatatccccgcatcgcctccatctgcttctgcaatctgtcatactcgcgcaggagcgccccgtccggcgcagtctcctttgtctctgccgccgtcttcatctgctcctccagctctttcatgcgctcctcacaggcaaacaccggtacaaaaactttttttaattcgtcctccacggtcacctccgcgtccacaaagttgacctgccgcaggaaaccgatctcctggcctcccgccatcgtgatgccgcactcctcgtcactgtctgggttgctcatctctatatccccggcaatcagctttagcagggtcgtctttccacagccgttgcgccccacaaccgcaattttttccctgtcgtgtacctcaaaattgacgtcccgcaggatcacgttcccaccgaactggacgcgtgcatgtctgatctgatacctcataattaaaacccacttctttctatattacagtgcaaaagccacggctgtctgccgcggcctctcttttccatggaacttcatatctctgccgataaactcctgttttgaactcttttggattataccgaatcccttctgtactgtcaacgcctcccgccgcaggttccccctcttttcctctcccatttatatacagaatttgctaaaattttaacaattttttattgattttatgagttaactatgtataattatggtaggggaagttggcaaattccagcatcccggaaaagatatcgtaaagcctgctatccgcaggtgtttaccatataaatatgaaaggaaagaggtttaataagatggcaacaatcgatttaagcaagtacggtattaccggaaccacagaagttgtgtacaatccttcttatgagatgttatttgaagaggagaccaaaccggagctggaaggctacgaaaaaggacaggtcagcgagctgggtgcagtgaacgttatgaccggtatctatacaggtcgttctccaaaagacaaattcatcgttgtagatgagaactccaaggacactgtatggtggacctccgatgagtataagaatgataaccacccggctacccaggaagcctggaatgcagtaaaggacatcgctatcaaagagctctccaacaagagacttttcgtagttgatgcattctgcggtgcaaacaaagatacccgtatggctatccgtttcatcgttgaggtagcttggcaggcacactttgtaaccaacatgttcatcaagccaaccgctgaggagcttgagaactttgagccggatttcgttgtatacaacgcttccaaggcaaaagttgagaactacaaagagttaggtctgaattccgagactgctgttatgttcaacatcacaagcaaagagcaggttatcgttaacacctggtacggcggagagatgaagaaaggtatgttctccatgatgaactacttccttccgctcaagggtatggcttccatgcactgctctgcaaacacagacttaaacggcgagaataccgctatcttcttcggtctttccggtacaggtaagacaacactttccacagacccgaagcgtcttctgatcggtgatgacgagcacggctgggatgacaacggtgtattcaacttcgagggtggatgctatgctaaggttatcaaccttgacaaggattccgagccggatatctacaatgcaatcaagcgtaacgcacttcttgagaacgttactctggatgcaaacggcaagatcgatttcgcagacaagagcgtaaccgagaacacccgtgtatcttacccgatcgatcacattcagaacattgttcgcccgatctcttctgcaccggcagcaaagaacgttatcttcctgtccgcagatgcattcggcgtacttccgccagtatctatcctgacaccggagcagacacagtactacttcctgtctggattcacagcaaagcttgctggtacagagcgcggtatcactgagccgactcctactttctccgcttgcttcggacaggcattccttgagctgcatccgaccaagtacgctgaggagcttgttaagaagatggagaagagcggtgctaaggcatatcttgttaacacaggatggaacggcacaggcaagcgtatctccattaaggatacccgtggtatcatcgatgccatcttaaacggcgccatcaagactgctccgaccaagacgattccatacttcaacttcgaggttccgacagagcttccgggtgttgattctggaatccttgatccgcgtgatacctacgcaaatgcttccgattgggagacaaaggctaaggatctggctgcaagattcgttaagaacttcgcaaaatacgaaggcaacgatgctggcaaggcacttgtatctgctggtccgcaggcataattgctgcgaacaatccgcctaagaatcataaaagaagggactgccgcataaagcggtcagtccctttttacgtggtaagtactataatggaaaacagatcatgcccttcgatttcagatggaaatgtagctggaacattcgttgaaaaaaatgcgtacatttcttcctgtcggatttttgcatcggattccgtgtctcttccacgttttgacaatccacggaatgtgtccgacaaaccgcagacaatgaacggattccctagcgtccctagcggcactgcttcacagacaatataaaaccgcgcgaaccgaactcgtcgtcatcagctattcaaaacagggcagatgacgactcagacagcggcttcgcgcggttatgttctattcagcagtgccgcaagggacacacgagaatcctaaaattgtctgcgggttgcggacacacccgtggagtgctcaaaacttggaaaaacatggatcatcacggatgcaaaaaccgacggggtagaaatgccgcattttttgatccgaatttccagatgcattccatctgaaatcgaaggatatgatcttctctttataatattacttatcaagtcaaaaaggggctgccccataagcgggcagcccctcgttttactgcatcttaaagtaatcaatactgctgaccagctcatctgcgatctctcggagctgctctgcactgacatacacctgcttgaaggtatccactacctcttccgtctcatcgtatgtcttcttcgtgctgtccacattgccctgcgcgatctctgagagttcgctcactgcctgaagcacttcatttctggagctttcaaggtgtcctgtgctctccttgatctggcggatgctctgcatggagctgccgatctgcgcgattacctcttccactaccttctgcgtatcctgcatgctcgcactctggttcataatgatctcctgcatctgctgcataatctcaaccgcctttgcagaatcctcgctgagtgtcttcgcagtctcctcaatctccttgctcgactcattcgactgttcggagagcttcttgatctggtctgccacaacgccgaatcctctgccgctctctccggctctcgccgcctcaatcgaagcgttcaggctgagaaggttcgtctcctccgcaatcgacgtgataaacgcggttgcctcatggatcttctgtaccgaatcgttggtccggttcgtctgctcctgcacttcaccgataatgcgttccacctcgatattgatgttccgcagattgttgagcgtctctgccgccttctcactggactgctgcatggaagctgcattgtcatccaacagttccacctctgccgacgtctccgtaatattctcacccataatacgcatatgttccgatgtattctgggaattctgtgcctgttcggtggaattctccacaatctggttgactgccatgcgcacatgatccatggttccgtttgtctggtctgccgctgtaccgagcagttcggacgcatcgagcaggcgtttggcattttgtgaaatctcctggatagttgccttcatggcatcccgcagcgtgatcgtcacgcgggacagatcaccgatctcgtcgtgtctcccgagcagcttgtcttctacccagacattcagatcgccgtccgccacttttcctaccacctcaatactgctgcggatattgcggctcattgaggttgcaagcttcatgccgatcgcaatgcataagatcatcacagcgcataccgccatactgattgttcccagaatcttgttgatcacggcatccttttcctgcttgtccgttcccacaaaaatcataccgataatctcatcggtcgatccgttctgatataccggtataaaatatccataattcaaagtgccctcgatcgacaccgcatgactgaaataggattcgccgccctgtagtaccttttccacaatccggtcaccggccttggaattcaagatacggttccctcctgcatcgaccgccgacgtcataatgcgggtgtctccgtagaaaaatgtgacatccatgtcggtattgcccttgatgcggtctaccaggctctcggactttgaaatattatagctgcctttccagatatccccgttactggtctgcagataatctcccgtgttctgatcgtaggctgcgagcgtggctgccgccgttccacgaagcgcttcctcgatctcctccagcatggcgctccgtaccattgtggttgtcaaaaacatggaaatcaaccccaatgtaataaccggtgcaattgtaatccccagaatctttttcttaatgttcatactaatctccatttcgtctgtgtatctgcatatcgttttacgttctcttgttgcttattccacaacattcaccgtcttaaaataccagttgattccgccggtaattgtcgcatcatccagcgtcttacccgcttctccgaccgtctctccggtattcgtctcgatcacaccgtcaaatacaccattctgtcccgaaaggatctgttccttcgcctcgtctaccttctcctgcgtgccctccgcacagaaatccgccagattggtaagaccgaccagattctcgttcatgcctccgtaatagttgcttccgtcccaggttccgtcaatcaggctctgcactgccgcggtatagtaggcactccagttccagataacgctgcacaggcaggcatccggcgcattcttgctcatgtcggaattgtacccgatgctgtatacgccacgttcctctgccagtgtctgcggatactccgtatcacagtgctgggcgatcacatcacagtccatatcgagaagtgtctttgccgcattctcctccgcctccgggtcataccagctgttcgtcaccttgacgtaaacctctgcgtccggattgaccgaatagataccgagcgcgaacgcatcgattccgcccgtcacctcggagttgctgttatccatggcagccacataaccgatcttgttcgtcgtggtattcattcccgccacaataccgcttaagtagcgcgcctgatagattctgccgaaatagttattgaaattcttgccgttgctcatataaccggttccatgggaaaaataaatatccgggtatttctccgccatctccgctgtcggctccatgtaaccccagctggtcgtaaagataatgttacagccctcgtcgatacattcctgaatcgcctgctttgtcgcatcctcatcggaatctgggacattgattttccgcacaatctgatcgtcggaaagtccgaggttctgctgcattccctgaattcccagatcatgcgtgtacgtgtatccgcttccttctgccgggtctgacagatggagcactcccaccttgatctcgtccttcgggattccctccgtcgcggtcgttgttgctgccgactccgtccccgctgtctgctgcaagctctccgctcctgcatttgtagcataatcatcaatctgcgtatctgcaccgcagccggcaagcagaaaactttccacagctgctgcaatcagtctgatccatttttttctcatatccggtactctctttctgtatgctattatctgccaactttttacatctgcctttattatacacattttttattttgtcatcaataaatttgtaaattattggaaacatatctgaatggatcttaaaatattcttttttgtaaaacatttcttacgatataaacaaaaaaagccttcacagttctgccgcattttactgccggtggcaaatctgtaaagacttttcaaaatacatattcagttagctcaaaagattctgcatgctctttaagctgataaccagcgtagaggtgttatgcagaagcgctgatgtggtcggctgtaaaacgccgccgactcctagcaggatcaatccggtattgaatccgacaatcacgcggtaattcttgcgaatccgcttcatcaggccgtcgctcaacagctttaaggtcacgatctgatagagatcatccgagcttaccatgatatccgcgatctcacgcgcaatctccgcaccgtctgaaatcgcgatgccgacatccgccgcagagagtgccggggaatcgttgatgccgtctccgaccatgataaccttgcgtccggccgccttttcacgctcgacaaaaccggctttatcctccggaagcacctcggaataatactcgtccacgccgacacgctttgcgatggcgcttgccgtccgctcgctgtctcccgtcatcatgacgatcttcttgatgccggagcggcgcagggaattgataactgcctccgcctcctcacggagcggatcttcaatacagatcacggctgcaagctgtccctcgatggccagatacagatgggaatactcctccggcaggctctcgaacagttccttcgtaccctcaggaagggcagctccctcatcctcaaatacaaaatgatagcttccaatcacggctttcctgccgttgatcgtggtggaaataccatgtgccaccacatactccaccttggaatgcatttcctcatgatccagacctttttccctggctgcctcaacaaccgcttttgccatggaatgtgggaaatgctcctccatgcaggctgcaatcctaagaagctcatccgggctgtccccgttaaaggaaaccacttttgccacggtcggctttgccttggtcagtgtgccggtcttatcaaagacgattgtatcagcctcagccattgcctctaaatattttccgcccttgaccgtcacattgtaaaaactagcctcacggatcgccgacaatacggagatcggcatggcaagttttaatgcgcaggagaaatccaccatcagaatcgacaacgccttcgtcacattccgagtcagaaggtatgtgagcgccgtgccaccgagggaatacggtaccagacggtccgccagatgctctgcccggctctcaagcccggactttaacttctgggattcctcgatcatctgcacaaccttgtcgtagcggctggagccgcctaccgccttcacgagaatggtaagctccccttcctcgactacagttcctgcatagacataattctcactaatccggcgtaccggctcggattctccggttaaggatgcctgattgaccatcgcctcgccgtctgtcacgacgccgtcaaacgggattacattgcccatatggacaaccacctcgtctccctcacggacttccttcgcgccgacaagaacctccacgccgtccttcttcagccatactttgccgacattcaaggacatggtgcgcgcaaggtcgccgacggacttcttgtgcgtccactcttctaacagctcaccgatgccaagcaggaacatgatcgatcccgccgtctcggtatcaccgcgcagaatagacactccgatcgccgtcgcatcgagtaccggtacttcgatctttcgtgccgccagtgtctttatgcccttccagatgtagcggaacgacttgaccgtcgtccagcacgcccggataggatacggcagaaaaatcttggatgcatagcgtctcaccactctgccgatcagcttctcctggtagcttgcattcagctctcttccggaattctcgatcagcccgttcggcacttccacatcttcatagtgaaaatgtctgagcttgtcaatcagttccgctctgctgccgtcataacagatgactgcgtcacccgtacgctcatacaccttggcgcttgagacctgtatatcattttgtaaaaaatacagaagcgtatccgcctgtgcacaactcatgcggtactgtgccacatgaatccgcatccgccccttaatctcatgcttgattgcaaacttcactttactcgcctcttatcaaaatcttattcttcggtgttctctgcagtctcggtcttctctgctgcttctgcctctgcatctgcaaatgcctctgcctctgccttggctgcgcgctcctcattgatctcctttgcgcctgcatagatgtctccggcattctcctgtacggtgcttacggtgttcatcacgcactcttttgctcttaaaaaagctgcggtacagcttgtgtaaaccttcttggcatccttgctggaaagtactttgataccggctgttccaaataatacgccgcctgcaaaaattcctgtcttcttccaatcgatcttctcaaaacactttaacatacgtatcctccatttctatgcacaatcccgtgcatcctttgctgaacatgttgttcgctctttacattattgtgcattatagtaccgctttttgtatttttccagtattttttcgttattgataaacttcatcattatccaccattttccatcctgctcccggtttttaatacctccgccggatggctgcgttttttccttattataaaccggttcataccggctgcaataaccgatggcatcaaaaacctgtaaagcagcagagatttactcgatccctgccactccttttatttctatatttttctatttctcttccggttcgtccccaagcatctccgtaagcgtgtgccagccgagtaccgcgcatttgacacgcgccggcatgtgtgaaatgtccacaagcgccgatgcctcctcgagttcttctaattcctcgtccgataccgtccctttaatcatccgaaagaacagatccgccaggtgcatggcctcttccttggtctttccgatgaccagatccagcatgatatccacggaagcctgtgagatggcgcagccgtcgcccgtaaaggttccctccgcaatcctgccatcctccacgcgcagctgcagcacaatatcatccccgcagctcggattcacaccctcaagcaccagattcgcatccgcaagcttctccttgtgacccggatagcggttgtgatccgtcagcacctcattataaaatgtccggttattcatatcccatcatcctcctgacttgtgccagctgatccagaaatcgtccgacatcctctggcgtattataaaatgccacgctcgctctggcacaggacgaaatgccaagccattctaacagcggctgggcacagtgatgtcccgcccgcaccgcgacgtgcgcctcatctaagatcgatgcaatatcatgcgggtgtacatcatccacggtaaagctcacaattccgcaatgctccttttcgtccccgcttcccagaatatgcacgcccggaatttttttcattccggcaagcaactgggcggtaagcatctcctcgcgctccgtgatttctttccagccgatgaattccagataatcgatcgcagcggcaagcgcggccgcgcctcccgcattgaccgtccctgcctcaaacttatggggaagttcggcaaatacggctccctctctcgtcacacggtcaatcatctccccgccggtcagaaacggcggcatctcctctaaaagttcctgttttccatagagcacaccgatccccatcggcgccatcagcttgtgtccggaaaatgccagaaaatccgcgtcaagtgccgtgacatcgatcggcatatgcggcgctgcctgtgccgcatccgccagtaccacaccgccgttttcgtgtaccatcccgatcagtttttctgccggggtcgcccgtccaagcacattcgagacaagtgtcagcgcggcaagctttgtgtgcggtgtgacggcatcacggattttctcctccgtaaaactgccgtccggttcacactccagatatttaagcgtggctccggttcgtctggccgccatctgccacggaagcaggttgctgtgatgctccatgatcgtgacaagaatctcatccccaggctttaaccggggcagcgcatagctgtacgccaccaggttgatgccctcggtcgtatttctggtaaaaatgatttctctctcactcttcgcatgtacaaaccgtgcgacgcgctctctcgcatgctcatactgctctgtcgcctccacgcccagctcatagagcccgcgcagcggattggcattccagcgctcatagaattcccgctccgcatcgagcacgcacgccggccgctgttctgtcgccgcgttgtcgaggtaagcgatatcgctttccgcaagcagcggaaaatcctttttataatctgtcatatgcattgctccttcagataagtgtcaacagcgccgcgcacctcctctgacgggatctggctgtttatcgcttcgatcttcgccagtgtcagaagtctctgtgcctcctccgggggaatgcctctcgtggcggcataaaagagcatgttctcgtccagcttgccgatggaagcgccgtgattgccctccacatcctcctccgcgcacaggattaacgggatggtctggttgaccatattgtcaccaacaagaagcacatcctccttctcgtctcccttagctcccacacagccgtgcacaaaatcgatcgttccgcgcagcagcttcttcgcctcgttctttaagatgcccgatatctgcatattgctcttcgtctttttcccgcggtgcctggcgacataattcatatcaatcttctgcctgccggtgcccagatatccacttacgagctctgccgtgctctcttctccactaagttcaaacagtgttcccgtatagacctcggcgccacccagttccagctgcacttccttcacagcggcatctttttcacacgagacacccacatcatgcaggcagacggcttccgcattcatcgtctgcaccacatacagttctactttcgcgccctccccggcatataccttcgtctggatggcggacatcatcccgcccggctccccgctctcgcagagcaggattacttttgcccggctgtgcgctccggcatagatatgcaggcggttataggcgtgctgcccgctttggtaggaaaaacggtacacatacggttcgccgcagtctgcatgttccggaatcgccaaaagctcggtatcccatgccgcatctgcctccgacggctgatccatcgcctcgcccatcccggttgtgattttatcccaatccgtctgctgtgccatccgcagctgctcagcctctgcctgccctgcttcagccacactctgttttatcgctatactgccgtcgatccgcggcatcccaatcacggtttcattcattttcagccagttccaggtctttgcaggaagccggttgactgtgatcgtctgattctgttttgtcataagctcctcctttacccgatgctgcccttcatctcaagatcaatcagattgttcatctccaccgcatactctaacggcagttcctttgacacgttgcttgcaaaaccactgacaatcatcgaccgcgcttcctcctcgctgatgccgcgggacatcagatagaacacggcgtcatcgctgatgcggccgattttagcctcatgtcccacatccgcgtctcctgtgcggatgtccatcgccggaatcgtatccgatcttgagatgtcatcgagcatcagcgactgacaggaaactgccgatttgctgccggcggcttcctttgtaatgctcacggaactccggaacgtgctgataccgccgtccttggagatcgacttggtgttcatgtacgaggaggtatccggtgcggcatgcaccacctttgccccggtgtccagattctgaccttttccggcaaacgtgatgcctgtgaattccatgtgcgccccttttccctttaagatactcatcggatagagatacgatacatgggagccgaaggagccggacacccactcgatccgtcccccctccttgaccagcgcccgcttggtgttcagattgtacatgtttttcgaccagttctcgatcgtggaatagcgcagtgtcgcgccctcctcgacaaacagttccacacagcccgcatggaggttcgccacattgtattttggtgcggaacagccctcgataaaatgcagatacgcccccttatccacgatgatgagcgtgtgttcaaactgccctgctcccggcgcattgagccggaaataggactgcagcggaatcatcaccgacacgcccggcggcacatagacaaacgatccgcctgaccagactgctccgtgcagtgcggcaaatttgtgatcgttcggtttgaccagtttcataaagtggctttgcaccatatccgcgtattcgccctttaacgcgctctccatatccgtgtagaccacgccctgggctgccacttcttcccgcacattgtgatacaccagctccgagtcatactgcgccccgacacctgccagcgacttgcgctccgcctgtgggataccgagccgctcaaaggtgtccttgatgtcctgcggcacatccgaccactttgccgtcatctttgtattcggccgcacatacgtcacgatatggctcatatccagcccctcaatcgacggtccccagtccggcaccggcatctcattgtaaatctgcagcgcctgaagccgaaacagttccatccacagcggatcctttttttcacgggagatctgctcgacaatcgcctcggtcagtccctcatcgaccttgtaagcatcccgttcctcatccttcacatcgtatatgctgcggtcaatgtcttctacgtatgtcttctctttcaccgctcatcctctcctttttgtgccagcttctcatactcctcgtaaccttcgcggttgatcttatccaccagcgatgcatccccggatgccacaatatgcccgttcaccatgatatgggttgcgtccacatgaagcgcgtccaggatgcgcgtgctgtgcgtgatgattaaaagtgcgccgtccggattctccttctggtactcgcggattccctcggacgcaagccgcaccgcatccacgtccagcccggagtctgtctcgtctaaaatggcaagatccggttttaacatcatcaactgcaggatctcggatttctttttctcaccgccggaaaatcccacgtttaaatcccgcccggcgtaggagggatccatgtgcagcacttccattgccgcttttaattcttttctgaaattccagacacgcattttatttctgccctgctcgctcaatgcactgcggataaagctctcgagggagagtcccggcacctcgagcggttcctgaaacgacaggaacattcccgccttggcacgcttgtctgccgcctcctccgtgatgtcatttcccttgaaaaggatttttccctctgtgacgctgtatttgggattgccggtcagaacataccccagtgtcgactttcccgcaccattcggtcccatcagcacatgcgtctctcctttttttatcgtaagcccgacctcgtgcaggatcaccttgtcctccacgcgcgccgtaagcccttctacctgtaaaatctgctctgccatagctgcctccgtttctgaagcgttttctgcagccggaatcctctttcacgattccctccgctgcccttttggttttctttgcgacgctcccacacatttttcatatcctagtcgcaaggtaggatatgattcaaccacattctagaacgaaaccgttaagaaagcaagggagaaatcgccccgctattgagattgtttctcatattcacagagagcgtgcgatcgcattccggatagaagcaggcggggaaattggttggagcaagatgcgggaatttcttccctgccgctttttatatccaattccgtgtctttccacgtttcgacaatccacaggatgtgtccgacaagccgcagacaatacgcggactttttagtgttcctaacatcaccgcttcacagacaatataaaaccgcgcgaaccgaaactcgttggcatctgctattgaaagcatggcagatgccgactcagacatcggcttcgcgcggttatgttttgttcattagtgatgtaaggaacacacaaaagtccttaaattgtctgtcggcctgcggacacatccgcggagtgctcaaaacttggaaaaacacggattatcgcagatgtaaaaagcggcagggttagaaattccgtattgtgcgatccgaatttccccgcctgcttctatccggaatgtgtcggcacgctctcttccgaatctatgcctccgcaaaacgtgcgaatgaaagttccgctccgtttgccacgcggctgcagatattgactgcccggctcatcacatccgaaaactgtccatcctttgtgacgacaaacagcatccgctcgtccgctttgatcgagacgtcctccacgtcagcgatttctctcatctcccgctgtacttccctgctcccatcctctgtcagcttttttgataatcgataatatcttcccataatgccatcctttctgatcgttgcatgtttggggttagttatatctaatcctgtttttattatagcactgcgatctgaaatgaaaacggggttgctgataagttttctcattatatccggctctgccgcatcttttttacatattctgcacatactgtgcctgtcgcaacacagattacccggtatatcaataaaaataggagaaatcaacatgggaaataatatggaactcgattacgaaatgttctgctaccagtgtgagcagactgctaaccagaaaggctgcaccaagctcggtgtatgcggaaaaactcccgaagtcgcaaatctgcaggatcttttaatctttcagatcaagggcatcagctgctatgccaagcctctgatcgaaaaaggcactcctatggataaaagtgttgtcagcttcatcgaaaatgtgctgtttaccacacttacgaacgttaattttgacgcggaagtacatgtcgaacttttgcgcgaatcccagcgcatcaaagaagaactccgggcttacgcaggcgctcccagtcagcccacgcttcacgccacctacgatcttccgcagaccaaaaccgagatgctgcgcgacgcgcccatcgccggtatcatgtatgacaagtcgctcgatccggacatccggtccctgcgtcagaccgttctctacggactcaaaggcatcagcgcctacgggcatcaggcgagagagctcggctattacagcgatgaggcggatgatttctatattctcgccctggaagccctcacggacgaccggctgtcggtcgaggaactgatccgccttaccatgcgcaccggtgagatggcaatcgaagtcatgaaaaaactggacgaagccaacacggccatctatcagaacccagccccgcaaaaagtcaatgtccacctgaaaaagggaccgtttatcatcgtctccggacacgatttaaaagaccttgaaatgcttttaaagcagacggagggaaccggcatccatatctacacccacggagagatgcttccctgtcacggttatccggggctgaacaaatatccgcacctcgccgggaatttcggcggtgcctggcaggatcagcagaaacagttcgacaatcttcccggctgtattctcatgaccaccaactgcctgatgcgcccgcgcgactcctacaaagaccgcatctacagcacaaatgtggtcggctgggacggtgtgaagcacattggcaaaaacgagaacggcgaaaaggattttagcgccatcatagagcaggcactggaactcggcggctatcccgaagaccaggacgtgcaggaaatcctcgtcggcttcggtcaccacgccacactgggctatgctgatgcgatcgtggatgccgtaaaatccggaaaactgcgccatttcttcctcatcggcggctgcgacggagcgcgccccggacgcaactattacaccgaattcgccgagatggttccacaggactgcctcattatgaccctcgcctgcggcaagtaccgcttcaacaagctggacttcggggaggtggcgggtcttccgaggctcctcgacatcggacagtgcaacgatgtctactctgccatccgcattgccactgctctcgccgatgcatttggcacggacgtcaacggtcttccgctctcgctgattatctcctggtatgagcagaaagccgtcgctgatcttctcgctctgttaagtctcggcatccatgacatttatctcggtcccactctgcccgcctttttgaatccgaatgtcctgcagtacctgacagacacgttccacttaaaatccatcagcaacgccagggacgacatccgcacctgcctcggacaggcagtctgattttttcggttgtccacaatgaaccaggtgtgcgcctgtatatgcgcatcacaatttccagcttcccgcttcttttctgcccgacacgaaatccgcatagattcccggctggccgatgagttcctcatgcgttccgcgctgtacaatgccaccgtcgtttaccacgaaaatctggtcggcatgacataccgttttcagccggtgtgcaatcatgatgatcgtcttatctctggtcagctcctcgattgcccgctgtaagcgttcttcgttctccggatcgacattcgccgtcgcctcgtccagaatgacgatcggcgcgtcctttagcatggctcttgcaatcgagatgcgctgcttctccccgccggagagcgatgcgcccccctcaccgatgaccgtctgatagccgtccggcaacgcctcaatgaactcgtcgcagcacgccttcttcgccgctgccacaacctcctcgtgcgttgcctccggtctgccgaacttgatattgttctcgataatatccgcaaacagatacacattctgaaataccatgctgatctggttcatgagcgcttcgagcgtgtagtcgcgcacatctcttccgcccaccgtgatgcttccgccatccacatcccagaatcttgcgatcagattgcacagcgtcgtcttgccggaaccggacggtccgataaacgccgccgtcgttttgtccggaatcgtcagattgattcccttcaggatctcctttttctcataggaaaaatgcacgtcgtggaacgcaatctcatgatgctccggcgtgatgtcacttcccttttcatccatctgcgggatctcatccatccggttcgcctgctcgatggaactgctgaccagacgcaggacagacagactgctgcccgccgtctggatctgcgcaaagatcacaaacgacaggatcgtaaacatcagcgcacctgtcatagacagcgtcccattcagataaaataccacagcctccaccatcataagcacactgaaaagctgaatcaccagcccctccgcaatcgtgtacggtgtaaaaagctgttccagttccagattgctgctccggttatactcgagcgcctcctgtattcgtctgtcgcctcttccgacgaggttaaaggacttgatcacactcattccctgtacctgctctaagacggctgcgacaagtttcgcctcggattcctgccgcttcggcgccgacaccctggattttttctccatcttagacacgatcagcagatacacaaacgtccctgccaccactagcagtcccgcgcgccagtcatagacgagcaccatcacgttaaagacgatcgtgttgatcatccccgcaaaaagcccgaccagcaccatcggcgcgatggtttccacattttcgagaactgtcgttgtgacaccggtaatttcgcccagactgttctcattaaaatagcccatcggcacgctctttagctgatttccaattgcaattctcttatttcccgccataaaataacccgcgtgggtctgctccagctgggaaaatgtcttcgtcgccgcttttccgatgattcctgctgcaatgagaagcaccgttttccacacaatgccttccccgctgccctcgccggtcagcgcccggacggcaagatagaccgccgcgatctcaaacatcccgaagacagcattgataaaacaaaacacgatcgacttgttgatgttgtcacgttcatccccggcaaacttccagattttctgaaatgtctctaacatgtctgattctcctcctttactcccagatgtgcctgccacatttccttataaagcgcactcttctgcaataattcctcgtgggtaccgcttgccgcaagcgttccgtcctgaatcagaaggatctgatcggcacctgtgatcgtggaaagtctgtgtgcgatcacaatgacggtcttgccggccaccagcttcgtcactgcgcgctgcaccttcgtctcattctccggatccatgtaggcggtcgcctcgtccaaaatcacaatcggcgcatcttttaacatcgcgcgcgcaatcgcaatccgctgccgctcaccgccagagagatgtgcacctcctccgccgactctcgtgtcatacccgttctccaatccgcggatgaactcgtcacatccggccgcctttgcaaccgtctctacctcctgatcggttgcctccacgcgtcccatgcggatgttttcccggatcgtatcgtcaaacaggtaattatcctgcgtgacaaacgccacctggtcgtagagctgtgtcagagggatctcacgctcatccacaccgccgagcatgatttttccctgattcacatcccagaaaccggcaatcagtttggcgatcgtggattttcctccaccggacggtccgactaacgcagtcatggttcccatcggaatctttaagctgatgtcatggagaatctctttttcctcatgatagccgaaggatacatgttccatcacaatctcactgccaaaaagttccgccggcttttcctcgtgctgctgttcttccgcctttaaaatgccgtcgacattcgccacggtcgtcccgaccttcgcaagactgtcgacaaaactcattgccgccaaaagcggtcccacgattcccatcgacagaatgatgatggtaagaaaagcctccgcgctcagacttccgttccggtaaaatatccagccgaacggcaggattgtaatcagcgtcgccggtgcgatcgcataccctaacgacatctggaactggcagcgtttcatccactgataatagtaggaggcattggcaagtacccggtcgcggaattttgcgtaggaattctttccctggttgaaggctttgatgacctcaatacctcctatgtactccacgatcgtctcattcatctcctgcgtcgtcctgactgcatcattccagtctttctcataactgcccatgatgctcatcacgcagagcagtccgaccgggatggagatgagtgacagcagtcccattctccagtccagcacaaacagatagatgaggatgagtacggggccaagcagattggacgtcatttccggcagcagatgcgccagtgtggtctccatgccgtccacctgatctacaatgatctgctttaacttgccgctggaggtgtctatcaccgttccgagcggcaatcttggcagtttttctaaaattttctggcggatctccttcaacaccgcaaacgtcgccgcgtgagacagactcagcgcgaacgtgtacaacaatgtctttgcggcatatcccgccatcgccgcacctccccagatcagatacacggagagatcccgctccccgctcatcagaagggcgaccatctttgccgctgcaaaatagggcaccattccgccgatcacaccgaccgccgcaagcacgatggcgccgatgagcctgccgtgctctttttctccaagctcccagatccggagcagtggactctgctgcttcataatacttcctctctttccgccgttttccggcattttgttagtgttcactaacccatggatttattttaaggctgccagaaagggttcctctatggcagccccaaaatgcaatttcctgccagttataaatatttttccggatgaaaaatggtgtcaaatccggcaaaatgataaacctcgagcatatggatatatttttttgcctgcgcgcggctcatgtcatggcgcaccacctcaaacatcccgttgaaatacgccgtcccgatcatatggataaagtcttccgtgaccagaccggatctgatgctctcacagccgatggaatccatataccggtaggtgtactccacctcatactccatcagttcatcgataaagtgctcgtattttgttcccgccgagcaacagacgatcagcttgaattcctcaaaatgctcatacaggtaatcgaccagtgtgtcgatagcgccggagctgtaactgtacaccgtctcttccttgaccgccggttcatagccgtcaaactcctcctgcgtggcaaggaacattttccgcattccttccgccgccgtcccgacaatcgcctcgaacagcccctgcttgtcgccgaatctcgtgtagatcgatcccgtcgtcgtctgcgcctccgacgcgatcacgcgcagggacgcctccgcaaatcccatctgcagaaactctttttttgcacacgcgagaatgcgctcatagactccctctatctgctttgccatcgaattcctcctctgcgccagctgccctcttttgcgggcagttattctacaggtaatttcctgcaagcaaaaagcgcatattcataacgatgttataaaacactgttatgaatatacgccacctgatctttcccgtcaatattaaacgggattgttgaattattttatcattttgtacgtttatcaggatctcctctgcggctacagcgtctcgccctctaagtaccggtgggataaaatccgctgtccggctcctggcatctgctccacttccgggtcagcgtctatcatggcaaaaagcatctcaacggcactttttgccacctcatccaccacattggagatcgtggaaagctgcggtgtcacatatgccagcgtatcgatattgtcaaatccggtaatgccgtaatccaccggcgcctttctttttgcccgcttctgatccttcatgatctcaagtgcatactcatctgcggtacagacaaacgccgtccgctttccttcttttaatatggcatccactttctgcaggtaatcccaggagagaatacactccggccggagcgcgggatagcgtttcatctcttcctcataccccagcagacgctccttgtgaacatacagattctgccggttttttgtatctaacggcgggcagacaaacacgatgcgctcatagcccttctctgccgctctctgcactgcctcccgcactgctgcccgctggtcgatcccaacaaacgggatgccgtccgcaatccggttatccacagagacaatcgggcggtgcagggactccaggaatgtccggtacgcctccccctcgttgaccgaggagaggatgatcccgtcaacccggtaatccgcaagtcttgtcagctgctcgcgctccgtcccggcatccccgccgtgcagcgtaatgttgacgccgtagccgcgggcatatgcctccgtgctgatcgtcgagagcatctgggcaaaatagcggttcttcacgtccagcacgacgacaccgatgttgtacgtctgtcccttagccagtccggtggcaaggagatccggccggtagccgtgttcctttgccacctgaaggatcatctcctttgtctccggcttaatccgcccggttccatttaatgcccggtgtatcgttgttctggaaacgccgcataactgcgccagatcttttgtcgtgatcgccatattttcctgctccccgttttctttcttttcaaaaaactttcttctattttaatcgaatctgaaccatttgaaaagagagaggtacaagttccactgaaatttcgtttccgctgcaggagacgttttccagttccacaggtgttacacagtcatgttccttttgatttgtcgctttcttatcctcgtgaaacagtgcaatactttttaaaaccgtctccggctccatgccctgtaaagaaacggtcgcctcggcactctcctccatacggtttacaaagaaaaccgtcacttcatgcttttgcccgtcatagacgagcacatgatccacacagggtaccgtctcaaacgtgctgcacgcgtaggtgtctcccgtataccgtgtatctaacgtcacgccgtgcgcatacttcgccatcagggcaaacggataatacaccggctgcacccacacaccgccgtcctcctctgtcataatgcaggagctgatattcgtaagaagtgactggcaggcgatcttcacacgatccgcccgttttatgaaattcatcagcatacttgcaaacagaagcgcatcctccatggtatagatctgctcgctgatcgcgggtgccgtctgccacggtgcatcctccaccgatttctgcacctgcacgtcgctcatcgaccagacgccccactcatcaaaacagatgttgatcttatgtgacattttcttttttaccctcacatagtcgcagatgtttaagaccgtctcgatatagcgctccatatccagcgactgtgccagaaactctgccgtgcccttctcctgtcccccgtaatactggtgcagggaaatgtaatcgaggcagggataacaatgttccagtacggtctgttcccagtcaccgaacgtcggattcgtggacatcgaacttccgcacgccaccagctcgatggatggatctaagattttcattgcctttccggtctcataggcgatcctgccgtattcctccgccgtcttatgcccgatctgccagtccccgtccatctcattgcccaaacaccaggtcttaatgccgtacggcttttcgtgcccgtttgccgccctgaggttgctgtaatacgtgccggtctccatattacaatattccagcaccgcaagcgcttcctcgattcccttggtcccaagattcactgcatagatcggtgcaacctctgccgcgtccgcccacttcataaattcatccagaccgacctcgtttgtctcaatacttttccacgccagatcccgcttcctcgggcgtttctccacaggtccgatcccgtcccgccagtcatagttggagacaaaattgcccccaggatagcgcaccgccgtgacccccatctgccttaccttctgcagcacatcgccccggaatccgttttcatctgcagtcttatgcgacggctcgtagatgccggtgtacaccactcttcccatgtgctccacgaaggagccgtagatacggtcgtcaatcctgccttttgtaaatgccgtatcagctttaattgtcacatgtctcatcttctctctcctctgcctctattctttcattcccgatgttgcgattccttccatgaaaaacttctgtccgaacaaaaacagcagtaacagcggcagaatcgcaatcaccgtagcagcaagtgtcggaccatatttgatcgaattacttccaaccagaattgcaagtcctgctgacagcgtccgcatttccaccgaacttgtcagcatcatcggataaagcagatcgttccagttattcatgaaatgatagattcccagtgtcacaagtgccggctttgcaagcggcagaatgattttcagatatattttccactctcccataccatcaattttcgcagcctcatccagcgatttcggtatgcccgagaagaaggaggtcagcatgaaaataccgtaggcactcgctgcgcgtggtagaatcagtcctaagaacgtatttaaaattccaagcttatattcttccatatagagtggaatcatcaccacctgaaacggaatcatcatcgtgagcaggatgattccaaagagcagttttcttcctgtaaatttcattctggcaaacgcatatgctgccatagaatcaaaaaacagactgatgatggtgacgccgcctgcgaacacaaccgtgttaagcagcattctggcaatcgggagcactttccacacataggcaaactgtgttgtgacccactccgtcgggaaaaagattggcggccacttgatgacgtccgcatccgacttgaaggctgatacgccgagccagaacagtggaagcagcaccagcgctgcaaacagcagaagtaccaatgttccgatcacccgctgcgcacttatttttctcatgtctcgtcacctccctgggggaaagcatattttcttaagatcacggttataatcgcaatcatgcagaacagatagacggcgattgctgacgcatatccgagatcatacggcgctgtctgaaatccccggttgtagatataacccacgagcgtctcggtcgcgtactgcgggccgcctcccgtcatgacgtagatctgatcgaatacctgcagcgccataattaacgtcgtcaccacgcaaaaaccgatcgtatcccgtatgccgggtattgtgacatagaaaaatttctgcagcccggtcgcgccgtcaatctccgccgcctcatataacgactcagagacgccgagcgccgccgccgaaaggatggtaagcgtatatccgaaccctttccacaccgtaacaaaaatcaccgtaggcatcgcccatgtcgtacttgagagcatgtttggcatcgtgataccgatttttccaagcagatgcggaagcattccgtagtgcgtattgagcagcatcgaccacatgatgctgactgccgtcatagaacacacatagggcaggtaaaatacggttctcaaaagcttgtgcagttttgtattgcgcagcataaacatgagcagcagcaacgccacgatcatctggaggggcacctcaagcagtgcgaaataaaatgtatgaaacgtagcatttgccacacgctcatcctgaaacattttgatgtagttggcaattccggcgaacgagatatttttcatataaatatcaatattcatcagactgatcccgatcgctcccgccagcggtataaatacaaatacggtaagtatgagcagggaaggcgcgataaacgcatacgccttcacctgatgctccatacggtgttgtctcttttttactttcataatttccatcctttacggcttgcagctatttttgcgtcagtgaccgtcagacatcagtcggagatcaccgcgtccagcgcgtccgaagcctcctgtacactctgcgtcacgtctgccccggataaaattttctccatcatcggtttcatgacatcattgtcaatcatgcttccgcattccagtcccagatgccagtcacgtccaatctcggatgccttggatactgcacttaagatctcgttgttctgaatgtccgcattctcaagcacagagtaagaccataccgggaagccgttccggttcgaccactcttttaacacatcatcagacagccagtatgccataaatttatacactgcctctttggtctgttcgtcggcccctttcgtcagcatgtaagagcatccgccctccggggagtacgcgccgtcgcttccgcccgggatcgccgtgattccataattcaaaccaagctgtgtcagcccgttgatgttccatggaccgctggtatacattgcaagctggccggactggaacatcgtgtccgcatccgctgcggtgagtccctccggggataccccgtcctccgtcgcaagcttctgaatccactccagggttgcaatgttttcttcggaatttaaaaggttctgtgtcgcatcctcattgatgacatctccgccgttcgcccacaggtactcgcagtaataaccgtaatcggtcggaagtcccagtccgtactggttcttggacggatcggtgcaggcgattgccgcctcgcgcagttcatcgagcgtggtcggcggattctctggatcaaggcctgcctccgtgaaaagatccttgttgtaatacaaatactgtacattgtactgcatcggcacgccgtagagcgcatcgtctatgtaggattttgcaagcacattttcatagaaattgctcttatcaatgcccatcgtatcccagaaatcgctgatatcctcgatcagtccattctcctcatactgatgaagatactcaatgcccaccagcacaaacgacggtcctgtaccggtcgatactgccgttgcaaattttgtctgcaaggtatcgttgtccataatgtcaatctgcaccgtgatgttgtccgtgttggtctcgttgtagttgtcgataatctcgcgcagcacgtcgccgtccgatccggtaaacggcgcccacacggtcagcgtaatgccttctcccgcatcacttccgccgtctttttctgtctttgcttcctctgttgccgtgcctgcactcccctgtgcatccgctgtctggctgtctgctgctgtgctgccgcaccctgcaaacatggtcgctgccattgtcattgccagtaatcccgccattgctctttttttcatgttatcctccattctgcagacactttgtgtcgaggcaaccacagatgcaacctctgatttgcacgggcaatgaatctgcacccgtaacgtgtcttccatctcgtttgctctgcgataagggctcattttgtggtgtctgccgcatcaaacagccctgtgcaaaatgcagtatcgtccgcatttttgcactacttcctccccatacattgttttgttgtgattttttctgttttgcgtacacgtgtacatttttgtgtaaaaatatcgtccgcgcatttgcggacgcgtgtactcaacacactatttattataacaacagcatagtttctgtcaattatatatttttcatgtatttgatctataaattttgtgaaatattactgatacgaaacgctcacaaatcgccagacacttctacgctcccctgacatcctcccgcacctcataatacccctgtggataatgacaggcaggacaaaccttaggcgcactggttccgaccacaatatgcccgcagttccggcactcccacactttcacactgcttttctcaaacaccgcctgtgcctgcacatcccgcaggagctcccggtaccgctcttcatgcattttctcaatcgcgccaaccatgcgaaatcgcgctgcaagcgccgcaaagccttcctgctccgccgtttttgcaaaatcctcatacatgtctgtccactcatagttctccccgtgggctgcggcatccagattctttcccgtatcgccgatcagtcccagttcctcgccccacatctgcgcatgtgcgcgctcgttatccgccgtcttctcaaaaatcgcggcaatctgctcatagccttccttttttgcgatctccgcaaaaaaagtatagctgtttctcgcctgtgattcccctgcaaacgctgctttcaaattcttttccgtctgtgttctggcatacttgttcatagaatcctccattttttcacacgatctctcgctctaactctttgctccaacttctggtttcagcttattgttcttgcctttgccttattgcgctagtatgcccgatccgtcgaaatttatttatcctgccggcaaccttttgacggcttttttctattcccccaaacctgttcttcaaatatttctggggtcttccctgcctgcatagcaatgtgcgggtctgacacggctttttttctctctcagacccgcaagagcatatttttttgcgttatgtaaacttattttcctcctgctcgggtctgattcgtgaaaatcaatctcccagacccgttttttctgctttttcgggtctggcacggctttttcttcctcccagacccgcaagagctgatttttcgtttctttttccctcttgcaatggcattttcgggtccacaagtcttttttccttctgaggacccgcagtagactgacaagctcctccatatttccattgacccgaaaaaagcaaaaaacaggtcatctatcaaactggaaaaaaattgcatccgatagactggaaaaaaattgcacctggcaggcagaaaaaacagccggcgcattctgcgccggctgtccgtacatttcccttttcaaagttttatttttcctgcagacttcttttctttctgcactgtggctgtctgcactgccgccacggcaagtccaaaaacgatccgctatcccgatccgggctcactccctaagatcagcgctttacattgaaagccgccacgccaagtccaaaaacgatccactatcccgatccgggctcactccctaagatcagcgctttacattgaatgccgccatgccgggatataccgcagcatcgcccagctcctcctcgatgcgcagaagctggttgtattttgccacacgctcggttctgctcggtgcgccggtcttgatctggcaggtgtttaatgccaccgcaagatctgcgatcgtcgtgtcctccgtctcgccggagcggtgggaggaaattgccgtatagcctgccttatgtgccatcttgattgcctccagtgtctctgacacagagccgatctgatttaatttaatcaggattgcatttccgcagccactgtcaattcccttcttgagacgctcggtgttcgttacaaaaagatcgtcgccgacaagctgcaccttatcgcccagctccttcgtcagcttctgccagccttcccagtcctcctcatccagcgcatcctcgatggaaatgatcggatacttctccaccagcttcttccagtgctcaatcagctcctcggaagtaaactttgtacctgccttcggcaatatgtactcacccttctttgtgcctttccactcggaggacgccgcatccatggcaatcatgaaatctttgcccggctcatagcccgcatttttcactgcctgtaaaatgtactcgatcgcttcctcatcgctggcaagatccggtgcaaaaccaccctcatcgccgacggaggttgcaagacctttgctctttaacagcgctgccagtgcatggaatacctctgcacaccagcggagcgcctccttgaagcttcccgcgccgaccggcataatcatgaactcctgcacatccaccgtattggctgcgtgtgcaccgccgtttaaaatattcatcatcggaaccggaagtctgttgccggagattccgccaaggaaacggtacagcgggatatccagtgcgatcgccgccgctcttgccgctgcaattgataccgcaaggatggcatttgcgccaagctttgacttgtcctttgttccatccgcagcaatcattgccgcatccagcgcgtagatgtcgctcgcgtccatgccacagatcgtatcgttaatgaccgtgttaatattctccactgcctttgtgacaccctttccaaggtatctcgctttatctccatcacgaagctccagtgcctcaaactctcccgtcgaagcgcctgacggtgccatgcctcttcccacggtgccatccgcaagtgtgacctccgcctcaacggtaggattgcctctggaatccagtatctctcttccgattaccttttcaatctccaaaaaattcatgcttcgttctccttccctctcgccatccggactccggcttccggaaaacacaccggaaggcgttcgttacataggatggaacgcgtcccggtgcagctgttttccggcaggaaacggattcagcagctccgcacctgtaagaagtcctaaaatgatttacactgtagttagttgtgtctaactgtcgtcattataacgattctaaaagaagattgcaaccccggatgatgatactttttctcattgcggattgttgaccggataagaccgttccttcccttactgcaccgctactccgtcgtcatcttcatctgacgggtattttcggaaaatacttcaagctttgccagcgatccgaccagcgacatcgaaagcatcaccgcaagcgccgcctgcgccccggtaatgctgacgcggtccgccagatacaggctgaccggaagcgtactgcatccttcgctcttcgccagacactgcatctgctcctcattccggtaagtctccatcgtccctctcccttttcctgtgtacggcatgactgccctcctcgtcagaataggaataccataacaaacaacaactcataaaatacgccctgcccgggattcctcataaataaagctccggtttcacaccttcgcacctattcatcaaacggaatatcccagacagggcgctctatccagacatcctttttcttacttttcatgacggaatgcggaaaaaagtcccttcttttcataaggttctctcgtcacagctcccatctcatagccggtcttgtcgatgacttcctttaactttgcatcatcgatgtcctgttcggtcagaatgacagtctccccttttgcatgggaagaggttaccttcttcaccggaaacgcagctctcactgcctcattcacatgtgcctcgcacattccgcactgcatgccatccacttttaccacaattttttccattgctgttcttcctccgtattacttctgtctgcatatatcctctatcagctccacccattccttcggatgtactgcaagaagctcctcatgctgcatgtccagttcatgcagtaccgggtgcgcaaaatgcctgtgatagcgcgcccggtatttttctcccatctttaaggcatataaaatgtggatctcggtgcccgccggatcgatcgcatccggcagcggcgtaatcagatccgaataaaactgattgcgcaggctctcctttgtgataaaggagagatccacaccggcgccgcgcatcatgccgataaacgcatccacatatccgtctcccgccttgcgccacttctccagcttacggtttaaaaacggaaaccggaatctgccggtcgtaagaaacggataaatcatcggcagcatcagggctgtcatcagcttcgccggcagttttgcagactgatccagatccgaaccgccgagaatgccataatccatatgaatcactccgcgtgccgccataagtccaacgaatgacccgccgagtgagcagccgtacgccgcacagattttcccgccatagtgttccttaatatattcctcgatcttcgccgtctcctcgatcatcgtgggaaactgcgtctgttccgtctcgttaaacccgtcgtaagagacgcacgccacccggaatgtctccgccagcggctcgatcacctttccaaaattgctgcgccagtaacagccggttcccggcaaaagcatgagaactggctttccttgctctccaaattcatatactttcatctgttcccactcctgtctctatggtatattttctcaaatcttttctatcgttttcataccagacagacacaaagccatccgcccgttctaataaaagtgtcagcccagcgccacatcgagcatcatcatgacactgaatcccaccgcaaagaaaatcgtgccgacatccgagtgctctccctgcgacatctccggaatcagttcctccacgaccacatagagcattgcccccgccgcaaaactgagcagatacggcagtgccgggacaatcagtcccgccgccagaatcgtgaggatcgccccgatcggctccacaatccccgagagcacgcctcctaagaatgccttcggctttccggttccctccgcccgaagcggcatggaaataatcgccccctccgggaaattctgaatcgcgattccaagtgacagcgccatcgcggccgccgcggaaatctgggtgctgcccgccagataccccgcatacacgacgccgaccgccatgccttccgggatattatgtaatgtgacggcaagcacgagcatcgtcgtgcgcttcagctggcttttcggtccctccgccctctggctgttgcggtgcagatgcgggatgatatggtcgagcagaagaagaaacaggatcccaagccagaaccctgcaactgccggcacaaacgccagctttcccatatcgacaacctgctccatcgccggaatcaaaagactccagatcgacgccgccaccatcacgcctgcggcaaatcccgtcagcatacgctgcagccggtctcccatctcctttttcataaaaaacacgcacgccgcgccaaacgatgttccaagaaacggaatcaatattccgtaaaatacactccagctcatatgcaagcctccttttcagttagcttttgctaaccttattttatcaatcacttcctatttgtcaagcctcccgccagttccggcgcaaaatgtgcggcaaaaaaaatttccatgatacaaaaacggacactgaatcttcttcagtgtcctcccgtcacttctaacctgcacattcccggtacagcgtcttttgtctggtcccgccgaagatgtccataatatccgccattcccactccataggaaaggagcagcaccagattttctttcgcgtactcaaaccgctggaataactgctgtttctgttcccggttctcatataccttccagtacccggtacagagataatctcttccctgatgctcgataaatcctctcacatcctctaccggatagcctaaaagcagtcccatctcatgagggaaatccctgcgctcctgcatgtatctgcggtaacgcatccggaaaacaggaagcaccgcctccaaggaagtatcctgataccccagtttatgcagcatccccacaactggttcctgttccatgtattttttcaggctttctctgcggtataagagcacagccgcttttctgccggttgaaaaaagcacatacatggatattccggtatcccggatcagctcccggacctgacatactccctcacacggaatattgaacagattcgacggctttaagcctgcgattaacggcgcacactgcagtgcaagctgcagttccacatcctttggctccatctgctgcaaaatctcccatgtctcacgactcatgccgatccctcctgtgttatacgatcttcctagttagtcttatctaactatctgtatcatatacgacatcaggcatcttgtcaagaatcaaaagaattgtcgcaataagcatagactgcttttgagtgataagtaatattattagaaacacacttggagatttcatgtggaaatgcaggtggaatattcggctggaaatgctgtaaaatcaaagtaaatatttcaatcaacagaaccttttatgacaacatctctttcacacaggtacttcgataatcacttggtgatattttatatctttctttaaatactcggttaaacgttctctgactttcaaatccactatccagacaaatatttgtaatagaatcactcgtattttccaaacgatggcatgcatagttcagccttgcatcgttaagatattgattaaagtttctatggaatgtcttggaaaagagtctggataaaacatatttgctcacgcccaggtcttttgccatctcttccaacgaaaacttcttcttgaaatttgctgatatataggaaactgtctggtaaataagatcgttgctccccacactgctcttttctaccaagtttaattttcctatgcagcgtgccaacacaatttgaaaatatgcctgtgcaacagtaatatccgactgttctgtctctaaaattgcatttataaccctatatacctccggttcaaccttttccgctttgatgattgggtattcaggagccatggattgcatgatatctgcaaatttggctatcgtaaatggcgatgcaatcagataagtcgctttatttacaccgggtgtcagtacctgatagtgatgaataacatctggaaatacaaagcctatatctcctttttccatatggtatagttcctgtccgacaccaagttctaatgatccacttgttacacaaacgatctccagtgcattatgaagatgtggttcaatatgttttgacttcctatttattgctataatctcctcttttgtgtcaacatattttaactgcatgaaatactcccctttgcaacatttgtctatatcttctttcgatttggcaagcaatccttttacacctatcttataatcaacttgtaaataaggaaaggaggaattgcaaatgagcaacctaaaaaaatatctgaatgaccttttagtattctacactgaatattttgagcatccttaccatgtataaatactaaaaggactattttgtgaaaactgaatattttcttaaggccatttcacaaaaatgaagtggtccttttttattttcaaaatacagttctatcactttatatatagaaaaaagcactgtctcatcgagcaacgaccagacaacgctttctcctgtcaattttaatttgtataactaaaatctcaactttccttattttatgcgacttggcggtatgccttgccactctatatgtatccttttcccttgtttttgcccttatgaggtatctacaagggaaagtttttcttattcgattttattctccaaccaccttatcaagtagtcgggctgagtttcgcttaccttctcggttagcgtgtgcatagacattcatagtggtacttacatccgagtgtccaagtaattcctgtacatcctttggtgctgctccatttgagagcaggtttgtggtataagtgtgtcgcagggtgtggaagtggaaattatcatcaagctccgacaatcgtttccttgctgtccttaaagctgtctcaaccgttgcaggggcttcgtatgctccgtccggtctgatacatacaaggtcaatctcgttgtaatcaagcggaatgtcctctgtgccatccaaatgataaagctcatagtagatacgattcttttccttaacttccctgtagtagttcctctgatagagttctccgtaactgaatacctgctttctctgttcctttttcgctttctttaagatgtcagcgagcgtatcacagaaatccacgatacggactttctttcgctttgtcggaccaatctcggtcttgtgccttgctccgttgtaacggacacttcttcgtactgtcagatactgttcctcaaagttaatgtcactccaagacagtccgcatacctctccaagtctaagacctgtgtagtacgctatctgtaccggcaggacagcaggcttgtttctttcttccagatactccataagcgtttgatactgctctggtgtaatcgggttgataacctctgcatcctcatcattatcagaaaacaaatccacatcttcctcggctttcctacgcattaccacatactgcattggattgaatgtgatgtactgctttggaaagactgcaaatcggaaggactgttgcaggactgcgtggaaagaacggatatagtcgatggtgtaaccctttgacttaaaatttccttcctcaccgccaaatgcaagtaaatccataaacttctgcaaatgctccgaagtgactgtctttagttttctgtttccgattgggtgttgtttaatcctgtttactgcctgtaaatagttaccgactgtaccgttgctaagtgaacccgttttcaaatcttcctctgcccatacatctagcatctgtccgagtgtgaggttgtccgctttggctagaaatttctttgcgtcataatcctccatagccttgcgtaacattttctctgtctctgatttgctctccgtacctgcaaattctttctgaaccaagttaccacttgcatcctccacataaaagcggtagtaccatttcttgcctttcttccttacagaaccttttgccataatcgtttctcctttcgatatcggcaatcggaactggtgaaatgcttcttgcgtgtaagtatatcatagctccgtctgcctatctataccgaatcgggatctttttctgataaaagattggctagtcgatttttcgctgtctcaggattcttagaatacagtcttacaatatcgcccatatcgttcaatgcgttgacggtgtgggtgatttctctaaggaacataatctcattgtattccttattggattcaaaccccattgtctgggcgagcattttgttatctgtatttcctttgaaattcttacaagcgaactggaacgaatccacgaacagctcgtattcccgtaacatcagtagtagcaggtctttggaaaaatcactttcggactgttccatatcataagggagcttattcagaatggaagtcatcacatcacgaatctgtaattctcttttatccgtaatgtctgtttcgtattcgtccgtctcacctttcagccattccacagatacatgaagtgcatctgccagaccttctaaggtcattttcttggtgttatcaatcgttcctgcttcgtatctctgaatggttgaggctgtcacgcccattttttcagcgacataaggctggttcaatcctaactcctgtctacggctttttgctctgctaccgattgtctttcgcaattctttatcttttaacatacttgcgaacctcctttttcggtatgtcattactataccacataacacgatatattgcaatacgcaattctataaaagatgatagaatttcgtaaggcttgacatagcgttataaaagatatatactttaatcagaattgcgtaacgcaagttttaaaaaaggctaatcctttcttcaaaaaggaacatcctctgatatacaagacttgtaatcctacgcaggaatgaggtgatcgaatgacagaattaaagtttgctctctccattgaagaagctgccgactatacaggtatcggaagaaacactcttagaaatcttgtggaatgggaaaagctgcctatccttagagtgggaagaaaaatcttaatccgcagggaacgattagacgagtttctgattctcaatgaggggaaggatttacgagacagacacgcagtaaaagcggtcaagggaacaatgaaaaatgaataagggacagtcctaagaccatccctctggtatgtatctgactaaaagccatgatatacctacacgcaaatagattatatcacggacaagtcctcagatacaaccagaacttttggaaaatgaggacaagatggatgtgaatgggtgcaatcgtccacccagttatagcttgttggtaggacaagtccacccaagatgcaaaaggtgttatgaatagtccacccaagccagaaaatgaagtgggtgcaaccatccacccaagtgaagccgactggtaggacaagtccacccaacttacaaaaagtgctgtgagaagtcataccaagtgtagctatgaaaaaagctgtccgacctatgacaaaaagtgtacgctactatgattttgagtgtccaatctatggggtacattttcaaagagttaatagtaaaaagctctattaaaatcaaaatgtaataaaacaatgcactattaaaaatgaaatttaataggaacttttactaccacttccttgccagacacagtttaaaagtaagcgaagtaacacaatgctattgtcagggcaaaaatgctaacgaatcgtgctattgttttttcgattttaatagcagacttctactgtttctacggtttttgctaaaaagtctgaataatagaacaatgctattgttaaggcaaaagtgctaacggattcgtctattgtttcgctgattttcatagcaatcttctagcatttctgttaagaaaagggagtgccggatacggcacataaaaagtgtgccattaaaggcacaaaattaggtgctgagggaacagttacagctaaaagtgaacttcataagcaagccctcggcgtttgagagcgaaatacacccatcgcacaaaacttcgttttgtactctgtgtatttcgctctgcgaggcttagccgccacaaggcggatgtgttcgcaagacgagtgcctatgcactcgctcacagggaaagtttactactcacatctcatctatcttatctgtcctcttttccaaaatcaaaactgggaaaggaggaaatcgctatgccaagaaattcatttgtgcagatgtcaaagctccataatgttcgtggaagaatctattatatctccagtgacaaaaaacaggaaaatctctatgcggtatatgaaaccacagaccgaaaattttggacagaacttgccaagtgcaatcaggcagaatttaagaaaagcggtacagagggaaaatgtatcgaagcaagagaatttatcattgccctgccggaatcctttgtggattatccgccagacggactattaaaatatatgacggataaattcaaaagtcggtatggtgttgattgtattgcagcactccatcataacaaacgaaagacgaattatcatatccatcttatctttgcagaacgaaattatcttgacgaaccgatagaaaagattgccaccagaaatatgttctatgatgagaaaggtaatcatgttcgtaccaagaaagaaatcctagacgagaatggaactatccgtaaaaggtgtaaggtgatcaagaaaggtgaggtctacgaaagacagatgtttaccatcaaggacgctcgctttaagcaggaacatttcttagatgaggtcaaggtattttataccgatgtcatcaacggacttgtcaaagatgagaaagaaaagctgtctgcattcaagcgtggggatgtctatcttgccactaagaaaatcggtaagaacaatccaaaggcagataagattacactcaataataaggtcatacaggactggaatcgtactgtggatcacgctttggtatcggggatggagcgaaaggaaatcttaaaggtaaagcaggaacagatttcaactccgattaaggaatccattcacaagtatggcaatcatccggagcttttgtttatgattatctttcgggcaatcgagctgttaaaagaactcataaagttgctgatacagaaacaggaacaacagaaagccagaatctccgaccttatggagcgaagaaatgaaaaacaagagaaacaaccagctccatccgttacacagacagacaatcagacaattcctgctgtgacccaaccattcaaagcacctgctactactaccgcagaaaagaccgttattccgccaagaccaagaatgtctgagctggcacacgattatgagatgcgacttgaagagattatggagaaacttaaacgacaaaacagagccattcatacgcaggaagtgaaaaaagaccttattgacgaggatttgaagaactgtacaggattattccaaggaaagaaacgaaaggaattgcaggcacagtctaacaaatacgcagaaacgattaagattatgaagcagggattatcccatatcgtgcaggattacaaatatccaacggtagatgcgttcctgcaagtctataaacaaggcaagtccgagtatgaatcctatgtcaaagcaaacaaggaatggaactccaagtatggagaaaactcaatccatcgaaagctggcagaaaaacaggcagaagttcagaaacgggaacaggacagagattttaactatcgttcgccatcagacagaggagctagataatctaattaaattcaaaaaagataaagaccatcaaattctttatcttttttgaatatttatgaaaagtcatcctgctatttaaagtgtctcattagatttttaattgtttcgactatcataagaatgattacgcagaaaaaggaataaaacaatgtggtattcatcttcgtgtttccaattttataaaacagcagaaatccaatgctaacaattatcacagaaataagtttatgtatccatttttgtttggtggttaaacatattttatggttacttataggtgcaaataatatacacataaggacaagtatcaaatatcctagtacagttggctttaaatagattatagcccacttatcaagacaaccgagaaaaaagctgcctaagatacatgttaactgcgttggagcatgggcacctccggtataatgtcgtaacaatgaaaaggtaattacccaaattagggtatagccgagtgtatgtgataaaactccccatacgaacaataacactatggttataaaagtattcaaaaaacattctaagccatatatgtatatttctaattgatccgcagaaacatcctccccggatagttctgctaacttattagcaatagatgtagcccacttcgtaatcattcaaaatccccgcttgtatcaaatcttgttgtatatttggcaaaagcacttatcacgtctttggaataagaacgtgcgatttgtgtagttagatgatttgacaattcaatcgttcctgatgtaatacgatagatatgtgccatatttacaatataagaacgatgggttcggataaattcacttggcaaatggacaataatcttatttagggtagacatttgttcatagcatttgccgtctacggtcaatatatccacataatgtaatctgctcgaaaatgtcaatatatctgcatagggaatacttacaatttcctgcttgtttcggtatatgtaggtattattagataactccttcgcgatttcatccaaacacagaaaaagagtattttccttgacgggttttagcaagtagtttaaagctctgacttcatatcctcggaatacatattctctaaaagctgttaaaaatacaataataccttgataaccagattcacgaaggcgtttagcaacctcaattccattcatttgccccatttgtatgtcaaggaaaaatgctgaagcctgtatagttgtgccttcagaattttttgaaaaatattcttcgcccgattcgtattcgtcaatttcaatatcccaatcatattgctgcccgtattttcttattccatttttcagccgttctgattcgatcacagaatcttcaagtatggttattttcattttcatagtagtttgttattctccttatccggtatcataatatgtacggaaaaaattttgttatcagatgtaatctgcaatacgccatctgccttttctacaagctcttttactcgtcttatcccaagtccatgttcttttccttgtttaacactcaaaatgtctccatcaatgctaccttttatcacaccatcataattattttcaatgtgaatcagtatcatattctggtaaggtttaatataaaaataaatgtatggatgctcggttggatcagagattataagtctttctcctgcttcaatggaattattccatatatttccaagtatggatgaaagctcaacagaatcaagcggaaaattttcaggagccataatagaatattctgtcttaattccgtgtttttcagcataatcaagttttgcggtaagtatgcagtcaatagcaatatttcccgttgctatggcactttgcgtagttgcaagagtgttatggtattgctctgtatatgctataagttcatcccatttcttgtcttttgctaatacgttgattgcatccacataaatctgcatatcatgtttcatttttcgtaattgttcagttgtctcagataagctattgaactcagtcctttccagctcataaatcttttgttcttccagtaatcgtatgttttcttcttttgaataacctagctggtatatgtatagcatcaatactaaaaataaaataataaaaaacaagtcaaccaatgatagcctagctgaaaaggatgaatcaccaaatttatcaacagattccaaagtcagccttaatatgtagtgcccgattgcaagtccagaaattgcgatgaaaatatatgcaactttttggaacggtgaaagagatatgtctttgtttccaatagaatgaaataacaagacaaaaacagctatcattgccaaatataacatggtatatggcttccgtaatgttccacctaataatagctccagagacgctcctttataaagagtaacgggaataaagaacgaaatctgttctgcaactaagcaaatgatggaatacgaaaagccccaaaagatacggcgaattatactatcacgatagaacaatactgcatatccaatgtccaaaacacaagatgacatcaaagtgctgtaggatgatattcccattttattcagcgtgcataacacagcaaactgaaatgatacgaaaagaaacatcaaaactgcttgatgtttataatttgctcgaatacgcaattttttatggataaatattataaacaatgccagttctaagaaattaacaatatattcccatattgagtcaatatatagcatagctaccacttcctttaatcattctccgtcatattttatcatcaataaagtaggtacacaacataatatgctaccgtttgtgcatagtgagctaccattcatgcatagaggtattgaaaagtataaagattttgttatattcaaggtatactactacatcttaagtattctgagaatctataatatggagtggagatgataagatgtcgtactttaggaatattaacaggatatataatgtgtactagtatgtgttgcgtttcaattttcataaagataacctttaagaataattgaagataaccgttgttacatgattgaaaaggagtgaaggagtatgcattttaaaaaatctgttttaaaaaatcatttattgtatagcattataactttaatggctatagcaatgctatttcctattacggcatttgcacaagcttatgtacaaacatgggatcttgttgattctggcaaacatctagactatgacggaaacagcacttacatgagttatattaacactggggctgccacatggaatgcatataaatctggagtaatcagaaaagacagtgcttttgttgtagaagatgtatacgtaagcgatgtcaatgcttcgaatggatgggcaggcatgaacatattctagtggtaaaattgaactcaatacctattatatgagcggttatagtaatagtaaaaaacagaatgtagcgacacatgaattgggacatgcattagggttggatcacagtacttcaacagatgttatggatgcagcaattacgggacatactagtacgcaggcattatctcaaaatgataaagattcatatgatgccgcatataataattattaggggagggagaacgctatgaaaaaatcaagtatctatggtattttgtctattgttcttatcgtaggaatgttttttacaggatgtgcatccaaaaataatgcaagtcaactgaatacaaatgtatctaacttgccaatccaccagatgcacgcatcttttgtatatgatactgataacattcgcgaagctgttggtatctgtgattacgtatttgtagcaaaggttgtcagttgcgatggaaccgagtatcgaaatgttataacgactgaagatgaaaaaggaaatcctaaggaggtcggttcgccttacactaattatactattcaggttctcgaaaatataaaaggtgaacttattacagataaacctattcctattgttaaacaaggcggaatttcagaaaaacaagatgctatttatctgtttgagaatgattcactgccttccgaaaattccatttatatctttttggcatatgcacaagaggatggttcgttactaatttctggtccaaattcaaatgtaatgtgtaacgattcgaatatgtattctattaattctgtctcagaggaaaaatcagttacagaatacgatgagtttattacatataaagatgctaatgataatgagattattccagttgatcgagagcgttataaatctatatatgagactgacaataattaatcattatttctgaaatatatagattaaagatggcaggtaggtgcttaacctatctgccatcttttcggttttatacctatatgtagaacagttcgtgcatgttgggctaccattcgtgcatagagggattgaaaaaattaaatactctgttatattaagcacataccatggtaaacaaataaagttgtctgtaattgtcagacaattaaggaggggggggggtgaaaacgatggacaataagcaagtaaacaaggcaccccagaaaagtgcccgtctcgtacttcaggcagtgactgctattgctcgaagtaatgcaaattcattgtgccgtggtttgttgtatgaaccaaaagtaccaacgcagttaaaaaaataagattgggaggaattgactatgatgttaaaaagtttaaaacagaagattgcaaaagtaggtattggtttgttttgtgcaggatgtgtatttctttcttcagcagcatattctcaggcggcatcttacaccgcttatgcacttaaactgaataagactaataactttacctctatgcatgcaaaaacaacatccgatgattacatcacaaatgaggtaacagcaattaccaatacctcttacgcaaatttctgggctgtcaataacagcaagagtaaaatatctaataagtataagcagggtgttggaacaggatcttgtaatttaatctttaccaagagcggttataattctactaacacacaggtcggtatgggaatggaaaattatcaatctcaattatcaactgcatttgtaagtggaaatgtagattttagataacagaagggatgggcataaacctcttcgtgggtttatgcccttttggtaaagattatgaaaaaaatggttcttatagaaatcaaacattgtattgatcgtgcagaatataaagttgtttttattgctctaatgattttaaatattgcttcgtatattttatgtgtaaaaaatgatataggaaaaagttatcaatttattcgttcagcaaatgaaaatttcgtattacagggcactgaagcggcatatattccatatataatgtatctgttattgcctgtttatgcaacaattattgcatcactttccttaataagagaagaaaaaagcaatagttcaatcctacttattcaaagaatcgggaaaaagaaatatttagcaggaaaattatttggcattctgattgtaacctttttgacaataacaataccaatgctcataaatttattattatgccacttgacatatccaatacatggatatgacagtgcttggggagaacctgattacgctataggtttggtatcatataacgctgacaattttcttgatatggtgagattgcaacatccaactttatataatctaatatacatttttaattacggaatttttggctcgggattagctatcttagcttatgctctttcatattataacaaaatgaaagttctatatttcgcaaagatacctggtgctttgtttatattctatattgtttttaatttgattgtttctgtctttgggctaaatgaattctctatacaaggttatattatgcctaatgttcatggaaatataataggagaaattgttctgatattgcttatttttggattaagtattggcattatacagagaaaaataaaaaattatgaagttatataagaaaaaaattttgaatgttaatgttggaaaatgcttactagtatcacttataacatttgtaattagatatttttatgctaatgtgtacttggggtttcataatagtctggttacaataacagaaggagtacgttcacaaatatattttgggggaatactaatagatcattcgtttgaccttatatctttatcattttttgcgattttgtttatccttgagatttgttatcttacaatggacttatttaatgatgcaaatgataacatggtaattctacttcctcgttatgggaaaaaacacataatttataaggatatattaataaaaatgatattacgtgactgtattgtagttgtttccgattatttgttttttctttttgtagagcatacctctaatggcttagaagatttcaaagttatttttatgctattgatagagatttttcatttgcaaatgattagttatttgttttcattttggaaagattcaattataggatacatcgttgcatttattgtattttttattccagtaatggtgtgtggattttatttttcaatgggaaatgttatatggaaaatttggcattattccttgctacatattcctttatttaattggcataacaagcttattatatattatgtcgaagaaaattacgaatggactacaagcaatatagatttattgaattttaagtcaagctgtctcatttcagttatatcatccgctgttttggtgtggataggtaaatttctttgcgaaaaaaaacaaatattgtgaggtgaatgatatccatgaatttatatgtaaaatctatttcaaagtcaattaaaggtgaaaaagtgcttgatgatatcagttatacatttgaatctggtaaaatatatggaatatatggtaaaaatggttcaggtaaaacaatgctactcagagccattgcaggttttataaatacagacaaaggatacataaaatataatcacaaggcattacataaagatatggatgttttaccagatttaggagctgttattgaaaatatttctttttggagtatgtattcaggatttgaaaatttgaaaatgctttccaatataaaaggaattgtatcagatgaagaaatatatgaaataatgatatactttggtcttgatcccaaatcaaagaaaaaagtaaataaatattcattaggaatgcgtcaaaaactagctctttgtcaagcactgatggaacatccaaaaattttgcttttggatgagccaactaacgcattggatcagcatagcattgatttatttcgtgaacgtatattggaagaaaaaaagaatgataccattactatactgacaagccataataaagaagatattgaaatattagcggatgagaagatatgcatggaatttggtaaaattaaggagttgatgtaatgaagaaatttgtattaactatctgtgttgtaatcatttgtatggtgacagccttattctatggaaagactgggataaaaacaactacaggggttcatgatcctgatattgctttatcagaaaatacagctatggaaattttctatacaggagggcagaaaacttcttactttaacaatgaaagtaattactcattggatgatatggaaaaagattcttctttaatagctcgtataactgtaacaaattctcgtgaaatgagtttacgatcaacaaaaacaatggtaaaaatagaggaaatctataaggataattctgctaatctttcagtaggtgactgtatttacattatagaacctgtatcatttgttagaggtgaagaattttacactaacggatggcaatatctgaagaccgaagatacttatttaatatttttaaaaaatctaggatgtattgatgggtataaatacaccaaagaggaagaaaattcatttatgcctgtatcggaaatatattcaaagagaaatctaactcatgatgaaagttgtgtggtttttgattcggcggaaactctctattcaagtatatctatgtttgcatttttgacctcagaaaaaactatagtagataattatgagaaaatatggaaaaacattacaaattcaggtaagtatgaatgatttaattatttatgaatgaatctctcctattctatttcctgtgagaagcgtatcaatgttagaaattcatggagatactgaattaagcaatatggaatcattcaatcttaaagaaactaaaaatggagataatagaaattgaataaaaagaaattggcaaagagtgttgtaggcattgctttaattgtaagtgtagctatacttatcgttgtatgtgttggaaaaataaagcacattcagaataaaaaaaatattattggtacatggaagaatgcaaatgcagaggaagtgtttacctttcaagaaaatggaggacttgttgtaaacaaagatatgcccgaattgggtattacctgtggcaatgcattatatagcatatcttcctcaaatatgatttttgtggaacagagagataatagcgtgaattttgagatagaagtagatcaaaacgaattaacaatcttctttatgggtcataaatattgggaattaacaaaatagcaattgcatataaagcgatactcatgatatccataaccataaaatatagagccgatgaatcactcgttatttcgattgtgagttatcggctctatttcattatttatggaagggctaaagaaatatcgtattttatagaaatacttttgacagatttcttctcatttttatgttcttttatcaagtgctataccattccatattcatcgcattcacccaatcttgcatttctgaatcaagatacaaacgggcatattctagtggattgtcaatcgccagtgcatccaacattcgttgagagttaggagtagtaatcaatccatcttctgccttgccacagtcaatccgaagtatgtagccattgtaataattgatgtctatgatgttgtgatatttattatattctgcatgaacgatattcatattgcaaagtcctttctcttatctgtttcagttgtagaagcatcttgaccagttccagccgattatgtgatttatataatgttattagctgttaccggattttgcttcccttgtttttgcccttatgaggtgtcgtaacacaagggaaaaggatataacataagggaaagtctaagggaaagctcacttgccaaaactgtagtaaaatcaaggcattgcggattttatcgtaacactttataataccagttaggtgttaaagaattgtaggtatcaaaattctaatttatgtctaatgcatctgttacttcatctgcagcaattcctttttctgctttcaattttttatttgcatcttctacattcatttttgaaagtacaaacataatcaatacatcaaagattaacggaagccaaagatacatgaactgcatcatatcaagtgcagactgtggctgagttgcatttgttccgacatatccactaaactcaagcatccatccaacaacagcggttccaatacctccaccaatttttacaccaagagaagtacaagagtacatcgttccgtcaattctctttccctgcgtaagataagtgtatcagagcaagatgcgataactgcattcatatctccctgccatggtccctgacctaaggctgcaagagctgtaaatgccatcatcagcggaacactgcccatatatccggcaacaacaacaagtgctctaccgatgactgctaagacgtaacctcttaagttcagtttatacatacctttccacttaccaactaatgtcggtgtgaaaatcagggcaatgatcagtggaatatttactgcccatgcaaattgtccaaacaaattcttatttttcagtacccacgtcatgtaataaatgccagctccaatcatggcaccatataactgctgtaaaatatatgttccacaaatcatcatgtaatatttgtttttgacaagaagcttgaatgcctgtaccattccatacttttcattatcattctttacttctccttcattaagttcttcctccggaagttccttaacagaaagtgctgaaatcgtatttacgaccagaccaatgattgcatagataatagcaaccgttctccatgccgcagcatctccaccacatttatctacaaatccaactgtaatcgcctgaatcagaagacttgttgaaaatgcaaaaataaaacggtaagatcccatctgtacacgctctttgctgttctttgtaatcagtgacgtaagtgctgaataagcaatattgtttgctgtataaaacacaccatttaacagtgtataagaaataaagaaccatgcatatttagccgttgttcccaaactcaccggtactgcaaagcagccgaccagcgtaatggcacaaccaatatatccgtatagcatccagggtttcgcttttcccattttactgtgtgttttgtcaatcattgatccaaaaaatatatccgtaaaaccatcaaatagttttgatacggcaatcagggtacccacgacacctgcagcaagtcctaccgagtccgtcagatagaccatcataaaagatgtcaggaacgcatagactacattacctgcgatatcacccgaaccatatccgattttgttataccatttcaaatactttttttcttccatagaattcttttgctcctcatattcattgcacttagaatctcaagatgcctaattctaaatttttcttttgttttgtttttgtctgattgctctgtatatccggactttacattacaatcagactctctttccttgtttacgggttacatgaaactttattacccctttacatacggtatcagtgtaaactgaaaccggaataatacatcatcaaatcggtactgctccaatacaactggaccacaactattagaaccaatgccatttaatgcgtagtcaacacagaatactacactatctgattctattaattcataattatgcgttttcttctcaagttcttcctgtgtataataagaagcattgaatgaaaatgccttttctgcggatgccacaattccatatcggctgttgttaagctctacatattcacaatcataatggcttccattttcctgtggacggatatagtcctcatgtaaatcccctacatctgcccggtacaaaccgtggctcgcagcctgatgtttatcacaataactttcctgtggtcccattccaaagtatcttacagctgaaagttttttatccaggaacatcctcacaccaaatctcggaagatccgggaattctccatcttttgttgcttctatgtctgcatcaatctttccagcagcttctattttccatgtaatcgtcacatcaagaatcttctgtactgtctctgccacaacggaagcatggcttgtaatcttcacaccatgttttccctgcacaacctctgtcgtataggctcttgtgtaagccttatcatagtgggctttcttccattcagacttgatgtacatatcgttatctgttggagctctccaaatatttaattccatcggatggttcaagtattcccgccctgcgaatttcatctctgtaaagagtgcagtacgtttgtctatggtataagcaaattcacgccccttgatatgaatctgtgtatcattttcatttacctgtaattcagagtccactactgtttttggtatccatttctctgcaagtttacattttgtatcctctttgcttacctcaatttcatcaaatccaagaatatggtcttcatccaacagtggcaattcttttttcagatggtaaataagttttaaataacatttcccattctctggaacattgatcttcaggtttgtttttccttccccgtgtggtgccacagaaaactccggaagtatgcctttgctgatcacaagaccatcctgtgtcagttcataactgatcttcacataatctttcaggtcatcaaaatccatgtagttgtgaagcaccagctctccactttctttatcataggaaacaactcttacagggcggtatacattcttgtattccaacagtcctgtgtgtacagttctgtccggatataccaatccatccatacagaaattgccgtcatggatctcttctccatgatctcctccataagcatagattgtctttccattctcggcagtaccatgagcaatcgcatggtcacaccattcccagacaaaaccaccacacattttatcgttgttctgaatcatttggaaataatcttcaaaatctccaggtccatttcccatgctgtgacagtactctaccaaaaggaagggtttgcttccatctttatccagatattcctgaatttcggaaagtgccgggtacatccggctatacacatccagattgctgtaatcatatgtttcatcataattacggtatcttgcactctcatattgtgtgatgcggtctggatcataattctttgtccattctagtgctttttcaaagttgcagccataagcactctcatttcccattgaccacataacaatacagaaacggtttttgtcacgttccaccatgagttttacacgatcaacgattgcctcttcccataccggatcatctgcaatcttctcattccatcgcttgaaccgattgtaatcggtgtcttcttttctgtaaatcataaatggaccgtgagcttcaatatctgcttcatctatcaccatgaatccatacttgtcacacatttcatagaaaaatggtgcgttcggatagtggctggaacggatcgcattaaaattatgctgcttcattaacgtaagatcggttgtaatctgttccagactgattgtaaatcccgtaaccggatcggaatcatgtcgattgactccacggaatttaatcttctgtccatttagataaatgacctggtctttaatctctatctttcttaatgcaatgtgatccacaattacttcattttctgtttcaagaatcagtttatacagatatggattttctgtattccaaagttccggacttgcgatttctaatacagctgttccttcttcgtcaatacttcctagtgctacaactgctccatttttatcttcaatcgaaatttttacatttgttggagagtagaatttcatttcaatttctactttcgcaagcatatcctcaattcttgttttaatatgataatcactgattgcctgttttgggcgtttcaaaatgtacacatcccggaaaataccactcatacggaatttgtcctgatcttccaaataggaaccatcacaccacttcattaccaacactgccaccgtattcgttccatcctgaagtacatcggtaacatcaaactcactggtcatatgcgaaacctggctgtatcctatgtaagagccattgatccatacgtaaaagcaactgtctactccttcaaagttcaaaaaagattttggcgctttctcatctctactgtactcaaaagtatgtacataggctccacacggaatgtcctgtggcacatatggtggatcaaacggaaatggataccggatgtttgtatactggtgtgtatcatatccagccatctgccatacacttggaacctgaatctcatcaaaatttcctgtatcataattcttctcaaagaaagaatcctgaatgtcatagatgctgttaaaatactggaatttccaagttccattcaataactgcatacgatctgactcttctctgtgttccaccaagttatccattcttctggatgccggaatataataggctctggctggcattgtgttttcgtgcagtacgcttagattttcataataacgtggtacgatcataaatagctctcctccaatacatatacttttttgttctttgttttcctaaagcaaaccttatactttactttttgtttacgttccttagttatgctatatatagcttatcctaattcgcaaaatatgtctatgaattggattagacaaaatatgcactaaatgatacaatgataaaaagtacgaaaagaggtgctgtcctatatatttgaacaccggttatttgaaccactcacatatggatttcaaagacaaaagccgtccgctgattgtcggtagctgtggtacttaccgtctttccagacatcccaaacttccgacctaccgtccaaggggtcgtctggattatcagattatatatatcactgctggttgtgggcattttcattttgataatgtaaataatgaaacgattgttccagccggcaacattgtactgtacagaccgaaagaactccaaaaatatgaatattacggagaagataagacagaagtatactggattcacttcacaggaagcaatgtgaaaaatatcttacgtcaatatgggtttccggataaagaacgtgtctttcaagtgggtacatctaatgaatatgaacaaattttcaaacgtatcattatcgagctccaacgctgtcaagacaattatgaggaaatgcttgtccttttgctacgtcatcttctgatcagtttccaccgggaactgacaagagagcacatattaaaaaatgaatatcttgattatgagatggataatgctgttacctttttcagtgaaaactacaatcaaaatatcaatattgatgattatgctgcctcacgaggcatgagtgtcagctggtttatccgaaatttcaaaaaatataccggttctacaccaatgcaattcattgtgggaatccgcatcaacaatgctcagatgttacttgaaacaacaacttattccatcaatgagatttctaagattgtcggatatgataaccagctttatttcagtcggctttttcacaagttgaaaggatattcgccgagagaataccgaaagctgagaaacaaattctgaaatcccacgatgtggtcttctttctgataatattacttatcaaagcaaagcacgatatgcttattgcgcctgttacgggagcagtccctgctcctgcatctcacgcgccaccttcacatattcccggctgttgcggtaaatatcttttttctccgcttccgtcagctgccgcacgaccctcgccgggcttccgagcaccagcgatccatccggcacccgggtgtgctttgtgacaaggcttcccgccccgacgatacagtcacagccaatctccgctccatccaggatcgtcgccgccatcccgatcagcgtccggtcgccgaccgtgcatccgtggacaaccgcctgatgcccgatggtcacattgtcaccaatcaccacatcgccctcaatgctcgcatgaatcgtacagctttcctgaatgtttgtctctcttccgatcgtgatggttccctcatccccgcgcacggtggagtaaaacagcacacagctgtcctccccgatcgtcacgtctccgaccaccatcgcctcgcgtgcaatccgcacacctggaaggtctgtaatccgcttatagttcatttttccacactccttatcccaactccgcattgaatttctgcgcattttcatcccagcgggtaagacggatcctcagatctttgccggcgagcatgcgcgccggtgtccccctgccaagaagatattttttcgacagcgatgctccatgtgaagtgcccgcgatcacgccgcgcagcacaccggttgtcgttgcctccgtctgtgtcagcgttactgtctgaccgatcatggactcatgccaggctcccgtaccgcccgccggctgtgacggcttctcagcggatgcctctgccgcagtgccggatgtctctgccgtctgctgtcctcctgcacatttaaaattctccagtataaattcacaaatcttgcgcaaatcatggcgtcccgactcgtttaatatctccagattcagatgcgcggacgtattgcggcagttgtttaagctgtacatatcctgctttagctcatcaagagacgaatacaggctgaaatactttttcataatatcccagtgtttgtggataatctgaaagtaatcattaaacgcgagcacattcagcttggagatgataatatttctctgatccgcctcgttctcggtcgcaatccggcgcagattttccagataatcatcctttcgctgcacatcttgaccgagtaccgtctcccattcttccgagtattccttactgagtgcccgcatcaatacgtcgcggatgctccgctccgtctgctctaacattgctgcgagcgaatccagttcatccaaaacagcaaaatccttcacaaaatcaacaaaatacggagagatcggctcatataccagttctcccttatcgcggtaatccgtgagacccgccagttcaaacacatttttttcagacttctccacacgggtcacaaatccatagtcatacagcttttccacccactcgttaagcttttcggaatatgcagggccgataaacttttcaatgaagatgcccatgctgcttctggtcttgctctgattcacatactctgttctcatgagtgtacacatacgctcatacgccgtcttgatgaaagctccccgctcccggaaaatccatccgatgtcaacaggactcccgtccagattctcgatttcatcccgcatctgcatcagcagccccggcgaccgtccgcacagacaaaggatctgctgtctttccttctcctccagaagaccgcacggcatatccctgtaaaagttaaaatactcttccaattcctcattggaaaaacctttcagcgccagtgccggaaacgcatcctgaaaattcgacccctcctgcatatgatgcgcgatcgtgctcacgctccgcctggagatcgtaatgatcgacagattcagccgattggcgccctttggcgtcagaccaaacaagcgctggaaaaactgcccgtccttgaagattgcctgtgcccggtcaaattcatcgattgtcagaatcatccggattccaagctttgtataatattcaaacaacgaagacaattctctcgtagcattcatcttaaagacgacgtcatcctgatgcccgatattttcttcaaagaactgataggatttgagaattttctccaccagcctgtcatttggcacaggtgcatcgcgaagctcctcttccccgatggtatcagaaaattttagaatcagtactgtccaaaactgccagaacgaggttcctgcctccagcaccgtattaaaatagtaggtgtgcggctttgccgccctctccagttcgtcgctcaggtgccggatcagtgtcgtcttgccgatgccgtttggtccaatcagcgaataacacttgccataatctccttcctccacgaagaagacctttttcctcagtatctggctgacctcctttcgttcaatatataattcacccattattctcttcctccgttcttctgtaacataaattccacaaacaatccggtattgatcttcactcttccgccagatgtaatggagatcacacggcgtgcctcaagcagattcttggtccgctcgatctcctccgtgctatatccctgttcttctgtgagtttccggttgatctccttcatatcggacgttctctgatcaaaggatttcaccgtggcaaacgccgcactcttcagatactgatacgtcttgcggctttccggatcttccacgctgtcgccgtcttccaccagaaggatatcaaaatccgtcagcagcagctctctgataaactgccgtaccatctcttccacatcgctgacgagaatccgtgatctcggacagcggtcactcacaaagtaagcaaacatctggctgcacagccgcatcagatacgtcggattacatcccgacagatccaatagcttctccaccgcccgttttccaagttccgtgtcgtatacgtcatacccgaatgcccgttccatcggctccttcaccagccggacggacgcctcctcatccagcgccgcaatctccacagacttggcaaattccgccgtgtggttgagtacgccaaggctgtcaaatgcccgcatcatcgcctcatgtccgatgatcacctgaataaaaccatactgtgaaaatgtcttgataaagttcgggatagccgccaggctctcatttttctctttgtccctgcgtatctcgctcatgatggtcgtacatagaagcgtaaattcatccataaacaggagaatcacatgttccccgccatcataccggaaaaactcccggaaaaatctctcgaagagcgccgcccacgtctcattgcctgccggatcaaacaaatccggaatttcaagctgattctgccttaaaagctccaccacatccggatgatgatcgtagatctcattttcaaagcgggacagaatattggcataaaacgaccgcttaaagtaaggaagcagttccacgccgccggtttcgtccagaatgttattaaaattcagcatgatcgctttctggcgcagcttctcattgtccttgatataattttttatctgatagaccagactggtcttgccgctctttttctgtccgtggataatgactgcacttcccggaatgaactgttcctccccgtctacggttctaagaatactgcttcttatctcgcggctctcctcctcgcgcccgaagaacatcttattgtcttccaacggttgtccctgcgacggttccagatacggattctctgcaccggtatccttaccttccatcctgccggtgccgtactgcagccccagataattgccggcatcctcgcgaaccgtctttttctgcagactgccgttgcggtcattttccccggtcagaaatgcggtcgtgtattcgtattccacggaccagccgatgtttaagcttcctgtatatccttcctccacgctgatcgcaacttcgaccgggatctgatccccggcagccaggtgcttctgttccaacacgattttagaaggaacgtccacgccctctgtgtaggattccaaaataatcccgacgttgtccgccaactgtaggttcatatttgccgctccgttcccgacgatcagccagaacgtcttctgtccgttctcgatcagttcctggttcggcttgcaccagatcttcgggcgggtcttctcatcctgatacatggagttcagcagctgtgcgatctcttttttcaattttgcaaaaatgttggcgccatccgctccgtccgtacacatccacagaatctctaccgcctctctgctcggatgcttcttgatctcttcctccagttcgcggatctcccggtaggcatcccgcagcaggcgctcctgtaatgaaaatcccggctgattggtgtaatcgcagacgctcatgcacgccctctgcagcttttcaaagcgcgctctgtcatcctttcccgccagctttaaaaaacgcacctgcatgtttaaaatcagttctctcacatccgcagaaatattacttccagagaggattccggtcaggtttgccgaaaagcggcttctgtccttcttatagcgctcccgcaaggcctgcagcgcttccgcaaggctggtcgtacggatcatatcgtcaatctgcaccgcatatcgaagcagctcattggtcagcgtcgtattcttctttaaaatggcgcagacggtctccatactcttctgatccagcagcatcatgtgggagataagttcactcatctgcctgcaattctggttcagcagcgtctcaagttgtccgcggtctgcggtcttcccttgctgtaagtagttggcaagctgctctctcgtgccgaagtcctgcaaaaacagctgatagagacagtcgcccatcgagaattgcgctgcatttttcttattgctctttctgagcggataacgcagcagaacggacaggtaatacgtctgctccccgaataccatattggcgtccagaccgatcttgcggcagttcttctgcaatgtgccgatcaacagtcttccgatctggttctctctgtcatattttccacccgcttccgcgccatgctccagctccacctccggataggcaagcgcgattttggcagccgcaaaggattgcagttcccccggctgtccgtgaagaatatccaccgctctctgtgcattctcactattttccggcatgctctgctcgtttaaggtcactccctttaacagcagctggcttaaatccacctgttccatacagaactttgccagattctcgccgatcgcattttccagcgtgaccgaagcttcatccgcctcgaattcctccgtctgagcttccggctgtgcctgtgctcctcctgcctccacaagtcgcgcctccagttccagtccgtccgcacccggtgcaaaaacaatcgccgtttccttattcacatatcccgccagtatctgtgaggcaccgtaaaccggataatatttcgtcgcgttacggtaacccagataaatatcacgccccgcatcgtattggatggttgccgtctctctctgacaccggatctctatcacagattctgccagagacagcaccgtctgtccctcctccgcaaacacatggtgcacacattttacaaacactctctgcccggtgagcgtatggctcttaaatgcccggttgatcataccgtccgagagcacagacatataatgtcttgccttctggtccaccacgatcgcccggtgcagttcatcgcactgcgtgaccgttccctcctgccaacggatcaatccgctgtaagcttccgatatgcggtgcacttccgtgatccggttgtcctcgcaggcgaaaataacatgcaggcgtgtcacgttcatctggctctttaaaatattgatgacgttcgggtctgccagcgtcagggaaaaattcatgacacggttgatcaccgcaatgccttcctccatattaaagtctgtgacaacaccgaaacggtagatcttctgaatctcatttttcaggatctgttttccgtcctttacacggtaaaaatcatcccccacgctgtcgataacgtggtaagccgccgtggaatccatcatctcgaagatcacactctccccgctgcaaagctccggaatatcaaaatccacctgttccggtacggcggtgccaagcgtggacattacctgctccactttccgcacctgcaatgcatccgcctcaattttaagacagatatactggttcttcgcaaaggacgccaacaccagaaccggataattataatcaacggacggatgctccatgccggttttttcatttaccattgtgccgcccggcacatattttaccagatagcagtgttttgccgtctttatcgtctcttccgtttcaatctgtgcaagctccggattaaagatcgcaatcgcgccgtccggtgcatactcctgatctgtcacaagctttttattgatatagcagtcgctgatcagcgcatagtgtccgttgtagagagagataattccgagtttcggagaagcccccgcatagcgcgcctcctccgcttccagatattccgcaagcggcagtgtctttgaaacaatcttttttgtcactgcggtcaccgccgccggagcggttgactttttctccggatacggatgtccggcaccgatcttcacatccttcgcgcatgtcttgccatgcagggtatacggggtatataaaacctcataataataacttttggtattcagtttcggcatcgtctcacagtcaatgtctgtctgcttgaaatagacggttccctccttgtcctccagatgggcttccagttcttcctccggtacaataaaaccgaaccctgcactgaccggctgcttgatcatgtattttacgatataaccgcgcagtctctccggtttggattcttcctgcttctcctctgcaatgacagtcttctctgaaaccagtgcgacatccttcgccgcgcaaagcttgccctttaaagtctgctcaagcgtaaatgaaaccctgcgccccagaaccagctgcgacgcctcaccggcatctgtgagattattgacatggaaccagtattccccggaaatatagccggtgccgttatccgtgcggtaagccgtaatgggtccaaaatatcgcacctgcgcgatatcttccgtctgcagaaccgtctcttctgcgccatcgtctcccgcaagaagcgtcagtttttcatccgtatattccttcagctttccgacagttctctctccatttgagagcagcacttccacgtcctgtcccacaaacttctttgcataaaaaacagagaccggcagcatctttacctcgccgttcccatcaatccacactttcgcataatccgcataaggatacatcttctccagcgttacactgaccgcttcctgcaccacctcacccggttctttggcgcaggtgtaggaaaccacgtagatattgcccggtttgaatccaaagtcaatctgctcctgtgaaaacatgacatttccgcgcggcaatccggcgttctccatcttcgcataattctgtgagacatagcagttcccgataaagccgttcgtccggagtgcattcgggaaaaataaaataattccccttcctgtataccccgcttccgccggttcttcctttcctgccgcattcaccagccggacatccttggcgatccattcgcaatccgtaattcccggcacaaaggagacctgatctccaacgtcgatctgcgctgctccggaatgttccggcactctgcaccagaaaccatcttctgcatcccggcttccgactgcgatcttccacgtatccgtcttcccccggctgcccggttcccgcacacgcaccactttcccgcagtaacggatttcctgcatatcggcaaacggaatcatggacacgccctcaccgatcaatacgaacatggtgtccgtcacagccgacacgacaccctcccgacagctcccgtccttcatggtgacatgcagtgaatcgttggtctccggaagcgggaaaatctccttcaccccggcaaaatcgaccggaacctgtccgccgcctgactgctccagcatcccggttccatcctgctgcaatctgccgactaaaaatgttccatcaaaaaaacggtaaattgctgccgtccggcttaatttttccgcgcagatcttgtgtgtgtgcgataccagccggatgtcatccgcgcagatctttccggatgcaagcttcagatgacaggacacggtacacgcaaaatctccataccgcatgagttccagttccgcagcatcacggcaggcttccggcgcaaatgtaaaattcccgatcattccggtatcacgcatcacatcataatctgtcagttcccctgccagccggatatccgccacatccgaaagcatgatttccctgccctctacagtgatcgcctccgccgcgatgttctgcagaatgccttccgccctgctgtcatctttcagcgtcacttcgacccggtttaataaataaatcccgatctctctgaccgttatatcttcacccatacaagctactccttctacaatccgtcatgtatttatggtattacagcacccgcgcttttgcaaggaattctttccgcgcaaaccgcccggagattcacggtgctcgtcaaatctgcatacagtcatacaatataaataatgtctttctgcatttcataatctcccggcggattcatgcaactttctgtaccatggttgtatttattccggctgctctgtattctgaaacttcgggtctacagccgataaaatacgccgtgagacccgttttctggaatattttgatcattttttctatctgctggagcgttctcgggtctacagcctacaaaatacgccgtgagacccggaattttacaatttccgggtctcacggcgtattttttgcttccagtgcccaaaagccatggatttatccctctttttctctcttatcaagcggttttggggtctcacgcagctatttttcctctgtagacccgcgccagccttctccaggctttctcacaaacgtcttctgcaataaaaaatatgccacgacacatttttgcaccaagcgcggtcgcctgcggcatgtctctccttcgcgcaagtgcgcatcctgcccggagggctaaaagcaccttgttacgcttcttcctgtaccgtaatattccgcacccagatatattttttataatgtaaatacactgcaggaatcttcacaatctcgtcgaggttcacgatacagtacaccaccatgaccggccatttcagcacaaatgccgcaaagaagccaaacggtacggaaaagcaccacattgccccaagatttcccttcatgtcgaacttggaatccccaccagcacagaagatgccgtccagcactgtcgtgttgaccgactgcgccatgatattgcagccgcagaagatcagcatatactgcagatactccgccgccgtctcactgagcggtgcaaaacgcacgatcaaaggcgagatcagcatcagaagaccgccggtggtcatgccgaccacgattgccatacgcgtcagtctgccgccgtacacttttgccttgtccagttctccggcaccgagcagatttccgatcagcacgcccgcaccgccgctgacgccgcggatcaggcacgataacatattcttggcgatcgtggtgatggaattcgccgccactgcgtcgcttcccatatgtcccataatcacagagtaggacacataggcgattccccagacaagcgccgcgccgagcaccggcgtggtataacgccagaaatcttttgtcagaacggcatccgccgcacggaacattttcttccagatgatctgcacacgcccggactgcttcgtctccaggtaactccagatgagctccaccagacgggcggcaaccgtcgcgtaagccgctccctgtattcctaacgcaggaagccccaacagcccgtagatcaagatcgcattgcagataatattcacaacgaccgctgtacagctgatccgtgaactgaccgtggcatagccggtatttttcagcaaaatcaggtaaatctgtgaaataccgcacagcagatatgacagggacaccgcgcgcagatagaccgctccgctctcaattaacgcaggatcggacgtaaaaatgcgcatgagcacctcgggtgccaccgccgcaaacacggtgaacgcaccgctgaatatgagattggtgcgcagtgcaatcggcatgacctcctcaatggaagccgcgtcctttttcccccaatactgcgctgccatgattccggagccggcggagataccgctgataaacagatttaagacaaactggatctgccctgccagagacaccgctgacagggaggtctggctgaccgccccaagcataatggcgtccgtggcgctgactagcgccagcataaactgctgcatcgtgatcggcagcaccagaagctttaatttctggtagaattcatcgtggaaattgatttttgcaaacataattttcatcctttacatgtataactcatgagattttatcatctatgccttgccgccgtcaatttcctttcttgcctttttttcagtcagattccggttttttttacatatcctgcactttttacatattcgatcttttcactacggtcttttcaccgtccactcgtacgttccggcaggcacattctcacttcttccatccggaaggagcactaccgcctccaccggcgttgcaagccggatatggcagccgtccggttcgtaccgccatgcgctctcgatcttccctgccacggaaagatagcttccggatacgcctcccaggcgctcgtccggataaggtgcaaaatgcagttttgcaaagcccggtttttccggtctgattcccaggatatattgatagtaaaactcccccacactgccgaatgcgtaatggttaaaggataccatattttcaccggagcccgccattttctcctcgttgacggttccgtccggctttaaggcatcccagcgctcccatgttgtcgtcgcgccacattttacctggtacatccaccccgggcagttctcctgcagtaatacatcataggcaagcttctgctctcccgcctccaccagaagcggcagcagatgctccgtcgcaaaaaatcccgtctgcagcccgtttttacggatgttggcaacaaagtttttcctgacccgttcccgcagctcgccctccggcagtacatattttaacgccataatataggcagactgataatccttcgccacgattccgtttttactcacgaattttttgatataagcgttcgtcgtcgcggcaagctgtctgcggtaccgcgccgcatcttctcgctttccaagccgttctgccgtctcgctgatgacctttaaatcatgcacgatgaacgcgtttgacaccggattgttgtgcatcgcctgccatgcgattccttttcccatcgcgagccagtcgcctagggacggaccaatccagagatttttcttccccatcttgcggatctccgcctccacaaaaagcttcatgctctcatactggcgcggcagtgcctcctcgtccccgaactgacgatacatcatctccggcagaatcgtgaccgcattgccccagcccagcatgctgataaatccgatcccggcaggtcctgtctgcggcaccgtggcgcacacatatccctcggtgttgtcaagctgccccagctccagatcccgcagaaaatttttccagaacgcatccgtattaaaattataagcccctgtcagcgcaaatacctgcccgtccccggtataacccatgcgctcatcccgttgcgggcagtcggtcggcacttccacatagttggatttctgtccccagacctggttctcatagagtttctgcaccagcggattttcacaggaaaaatatccggtacgcttcatctctgtgtgaagtgcgtatgccctgatcatccccggctgatatgccgcaccggaaagttccatataacgaaatcccatataagtaaagcgcgggcggtattttttcttctccgcacctgcatggtagacaatcgtcgccttcgctttgcgcagatttgcggtgtacaggctgccgtcggcatttaagatctccccgtgccggatcgtaattgtctcatttttcaaaaaagaaggatctatttctacaattccggcaaagttttgcccgaaatcaaggatcgtcacatctccatgcaccgttgcctcccgcaccggcatctcatcctgcagacgcacttccgtaagcgtcggctccagtgcgaacggcgcctcctttgtgtaggcggacgcatgaccggtcacgttctctcttccgtctgcaaaataaatctcaccatcgtactctccggcatattcatacggggattccagttcctccaccgtctcgtcggagacaatccttcggcttcctgccgcatcctccagttccagaatccatgcaaccgccggctgctctccgtatatctgtgtctgattttcgcagagaaaacgcccgcagtaccacccctgtccgagatagaccgtcagcgtattttctccttcccgcaacagctccgtaacctcgtgtgtctgatagagcacacgtctcggatagtaggaaaatcccggtgcaaacatctggctcccgatcttcgtgccgtttaattctgcttcgtacacgccgagggctgtgccgtaaaacatggcttttttgacctgtgaagccgtaaatttctgccggtatacaaaaacctcgccctcccggtattctttttctgaagtgatccactgttttcttaattcttccatctgcatttccatccttattctgccatctcccgctctgtcagatccgtgcgtttaaaaactgtgcgcttatctccagcgaccgcagcggagaattatccacccagtttttatggctttctaaaatcacggcatccacattcacgttctttgcctgtgcaatgagtgcatccagattcatattaccgcagccaagctccatgctgtccgattttaagatcggcgtcatggcaggcttcaaaagccgcgtgccgcggtcattgatatgatagagtttcattctcgtgtccagttttttcatcagggcgagcgcgtccacgcccgcctccgtcggccagtaggaatccagctcaaagttgacatattccggatctgtctccgaaaggagcagatcatacgccgttttctgctgctcaacgtgcagaaattcacagttatgattgtggtacaaaagctcaatgcccgcctctttcaaaatttttccggaggtattcagatcccggcacagcccctgcaccgcggctttatccgcgtaatcaaagcggtacattcccgtgatgacaacatattttgtgccgaaggcttctgcctcttttgcaaccgtctccggctcccgtctgatcgttccaagatcttcatggatgctcgtcacacaaagtcccgcttcttttacaagggcattccagtcatagctgccgccttttccgaccggcatccccgccgccttcgtgagcatccgcaccagaaaagaggtcggtttcaccataaaaccgttcagttcgattccgtcgtagcctgccgccttgatccgccgcagcgtctctgccgtctgcttttcatttttcgttactgttccaagcatgatctgctgtactgcttttttcatccctctgcgctccttacttcctattccttaattctttggaattttctgcaatgcgtcgtttaacgctttcatctgcgcctcgctcacagcgtctcccgcctgctttaagagacttgccagtgtcatgcgctgcatcatccgctgcaatgccgggttgtccttcacgctctccgccacatcgccgcggcttgcggaagcctgtgccatcaggctctgcacaatggcgtttgccatctcatttttcgccagttcccccagtgtatcggaaatcgaatagtgatccgctttaaaatcctctttgtcaaaccagttgaccacgtcgccctgcttgttgaaaatgtaatccggattcggtgtgtccacttttctcactgtaatctcatcggtgcagtccccggacactgcccggatcgtgtgcgttcccgtaatcggcacccggaatctgaagatgcgtgcgccttctttcgtctctttctctgctccgtccacaaagagcgagaccttcttctggttggagtacactttgatctccgtcacatcctctgcacggtccgtgtacctgctgccgcagagatgcacaaatggggctttgctccagtatgccttgtatacatagaacgcatcctttttgatcctgcggtccatcgtcacaagccctttctggttctctccgtgcttgccaccctcgtcgcgcccgtccgcagcgaaatcaaacaggttccatacatgcgttgcccacagatacgggcgctcctcaatcatttttgccatatgctcgtggtaaatacactgatattcctccgtgtaatcgccccgctccggattcgcactgtggtacgccggattcgcgtccgcgccgtactcggagagtccgatcacccggtcggggtaagtgctgtgatattcgtcaaaaaagctgtcgttctgttccagttccccgatgtaccagccaaagtagagattgtagctgttcatatccggtatctccagcatcgggctgtccgtctctaacataaagacatccgccataaccgtcggacgcgtcttatccagttcatgacacagatcatttaatctacggtgattctccagcagttcttcgttcaccgcgcttgctgccgtgatctcattagaaagtccccagcagacaatcgacggatgatgatagttctgtacgatcagctccttcatctggcttaacgtattttcggtgccgtctgtcatgtgcatcgtgatatacggaatttccgcccacacgatgattccgttctcatcgcagagatcgtagaactcctgcgcgtgctgataatgtgccaggcggatcgtgttggcaccaagctctcttacaatcgccatatcctcccggtgcatctcgtatgtcagcgcattgcccgcgcccgcacgatcctgatgacggctcacgccgcgcagcggataagatcgtccgtttaagaaaaagccctccctgggatccactttaaagctgcggcagccaaacgtccgctccacgacatcaccgcccggaagttctgcttttaccgtatacagatacggatcctccacaccgtcccagagatgcacatttttaagcgcaaacacggcttttgcataaccgttttccacgggaaccgtctgtgtctctcccgccacggcgaccgtcacttccggtgcttcccccgtcatccacagttccaccgtcacgtctgcgtccgcctgtttctctgcggcgtccagaatcgtcacctccggcgtcactttcatgccgtttccgcccgcatagtccatcgcaaaatgcactttaggcaccgtcaccagctttaccatgcggtacagcccgccgtaaaaagtaaaatcggccttctgcggatacacctttgtgttgtcggagttatccacatatacttctaacagattgtcctctgtcaactgctccgtcacatctacccggaatgtagaaaatccgccctcgtggtggaacagcttcgttccgttgaccacaacatccgccgtcatcgctgcgccgtcaaattccagatacgctctccctcccttttccagttccggttttgcgaaatgacgcacatatttgcaggttccgcgataataatcgtttccgccgtcctgtccgtcaaccgcgttccaggtatgtgggagcgttaccgcctcccctgtttcactctgcggatttttataaaatgtccagcctttctccagcaatattgtatttctcatctgttccgttttccctttcttttcttctctctacttcatttcctcaatcactttttccacttctgcctgttttttctcctgaatactcttctgtacttcctccatcttctctttggagagcggtgtctcgcgcattgcgcagagcgtacatacccagccgatcagcgggagtccgaaatacatgctcatcgtcatccagaagattgccggtgtagacgggtcggtcggctgcggcatcgtgtgcctgtaaccgatcaatgccaccagaccggttgcaatcgctgcagaaaacgaggatactaacttgtcaacaaagctgtatgtacctgtcactgctgccggaatgaatttaccgctgcggtctaactcgtaatcaataatgtccgccatcatcgcattgcttgacatcgtcacgcacatttttgcaccatttaacaccagggtcagtaatacatatacaatcatcattggaagcgtcgtcgcaatcagggtcggatcaatgaaaataaacaataccacaagcaccgccgccacggtgatgcacacatacgtccacgtcaccatcgcctctttatttccgtgctttcctgcgtatttcgccccgataaacgcgaagatgatcgaaggaagcataccgattacacttaagattgtcccaagctgcatattgccgataataattccgaacaacatcgtcgttacaaccgcctggcttgccgtctggctcgcaatcttatccgaactcgccgcaacgatgaacgtctgcagcgcacggttggatttgaccagctcccacatatcttttacttttaccggctccgccttcttcttgctcgtcacgcccacaaaattttccggtttatcgatatccgataccgcgatacagcagagaagcaatcccacacccgatactgccacgcagacgatgcaggatgctgcaagcatctctaccgtatagacattcccgtatttgggaagcagcatcaccgtaatcacgatgttaagaatcatcggcaccagatagttataagccgtactccagacgcctaccatcgggcgctgcttcgggtcgttcgtaagcatcgccggaacgatctgcgctgtgacgttgcacatcgtatagccgatcacatacaggcagtagagcagcacaaacaacacgattccatgtccctttccactcgcccagcagtacatgatcaggactgccagtgactcgatcagccatcctgccaccatcagaatcctgatctttccaaaccgcgtgttcatcttatcgatgatgatcgcaatgatcggatctgtgacgccgtctaagattcttgttgcagtcaggataatgcctaccaccgctgttgcaatgccatacccttcgtttgccacatagcttgccagtccaagcagcacataaaagcacattccgattccggaactgcatcccgcaagcgctaccctccatgtcttcgcgcggcggtagacaatgccgtttgtctccaccggctgttcttttttctttccaaacatttttgtaccctccagccttttccgtattttgccgctcccgtatgtctgctatatctgcggcctgtgtttttctatggctttattctagccggtctttttcttttctgtgtttacaaattcgtggtaatgtaataaaattcatgttataaaattaagtattgctatttttctaacattttcacgattttatgaactcccggttttataaaatcttatatagtaacatcagattacaagagatgcgcaggagaaatacggctgacgctgtattttttcactgcagaatggaggattttatgagattaccggaacattttttgatcggggctgccacagccgcccatcaggtagaagggaacaatatccacagcgacttatgggcgatggagcatatgaagcacaccagctttctggagccgtctttagacgcggtcgatcactaccaccgctatgaggaagatattaaacttctgtccgatgccggcttaaacgcctatcgtttttcgatcgaatgggcgcgcatcgagccggaggagggcgtgtttgatgcagcagccgtcgcacattaccgcgacgtcatcgcctgctgcagaaaatacggtgtagagcctttcgttaccctgcatcatttttccagcccgaaatggctgatgaccaagggcggatgggaagcagagacaacgcctgccgactttgcccgctacgtccattatattatggaagagctcggcagcggactgcactatgtatgcaccatcaacgaggcaaatatgggcatccaggttgccgcaatcgccgaacgttacaaacggcagatgatggcacagatgcagacggcacagacaacgtcaaagggcggcgacagtgcagacggaacggtgcaggtcggcatcaatctccagaaaatgctggagggtcagaaagccaccgctattgaaaatctggaagtctttggtgtggaaaaagtagaaaactttacttccatgcgcaccagagagggcgatcttctcatcatgaaagcgcatgcgctcgcgagaaaagaaatcaaagcgctctacccggacattcaggtcggtcttaccttaagcctgcacgacattcagccgcaggctggcggcgagacacgtgcagcctctgagtgggacgaagaatttttacactatctcccttatatcaaggaggatgatttcttaggcgtgcagaattatacccgctcactgatcggtccggacggtcagctcccgaatccggagggcgcccaactgacccagatgaattatgagttttatccggaagctttagagcatgttctgcgcagggtggcagaagattttcacggcgatctgtatgtcaccgaaaatggaattgcgacttccgatgacaccagacgcgtcgcttttatcgatgccgcgcttaacggcgtcgctgcctgcatccgcgatggtctcccggtaaaaagttattttcactggagccttctggataattttgaatggcagaaaggctactcgatgaccttcggtctgattgcagtcgaccgcagcacacagacgcggtatccaaaaaaaagtctgcaatttctcggacactggaatcagtaaaaaacattgctttgcacagaaaggaatacccgcatggacatcaaagaacgtctctctttttttcaggaaatggttcaatgtgaatacccgcttcatctctggcactacagcccggagtttgaactgatcgagacagactgtccggcagaactcatgctgccggacattatctccatgctgggtttctcctctctcgtgctcgcgcatatcgaatccgggaaccgcatgccgctgatcttggacaccgagttcgggcttctctggatcgccggttttgagtatcagggctttgcgctgcagcagatccacatcatcggtcctgcttttaccggaagcaactcgcatctggttctgcggaaaaagctggattcctaccagctgaccgtcaagctgcgttccaaaattgtaaagcagatcgagagtgtgccgatcattccgtcttccgtgctgctctcctacgccatcatgttccactgcgccattaccggcgagcggatcaccgcggatctgatctcttttacctcacacagcacgacaggcgttccggatgactcgccgcttctctccggggagcatccgggcatctggatggcggagcagacatttctctccatgatccgcgaaggaaatccggaatataaaaaggctcttgcaaaatccatgaccttaagctccggcgtcaaggccgagatcggcgattcactccgcatgagcaaaaataatcttctggtgctcctaaccctgtgcagccgcgctgcgatcgatggcggtctgaatccctccatcgcatacaccttaaacgattactatgccgggcgcattgaggaatgtaaaacgactgccgccacgaacaatttaagccgcgaatttctcgacgactacgtccaacgtgtccgcgccgcgaaggagacgaatgcacattccagacagattcagaacatctgcgactacatcagtctgcacatccgtgaaccgctctcaatctctctgctctccgaacggctcggctacacggaatattatttttcccacaagttcaaggaagtgacaggtctaagcgtgaatgcctatatccgccgcaaaaaaatagaagaagcaaagcttcttctatcgggtacgcgtatgagtattcaggacatcagcgatgaactgtccttcggcagccggagcttctttttctccagctttcagaaggagaccggcatgtcaccgacgggataccgcagagagcactgcaaggggtgagggcctgattgcacccaacatttctttttgaaccgtttatccagatctatttcccgtatcacccgctctttcattccagatttttgagataatcgttcttctaaatcatcctgtagagtagttgatattatagcagacgaaatacctgttccacggaatcagtaagattctccatggctttttcccgctgcatggcctcctctaacgtgcacaccccgcgcacgatcgggaaaaatgcgtcgatgccgttgtcattgcacgccgccgcttcttttgtgaccgaaccggcgaacgcaatcactttacagccgtacttcttggccgccctcgcaacccccacgggcgcttttcccattgctgtctgaagatccagccgtccctctccggtaagcacaatctgcgctttctttgcctcctcctcaaaatgaattacgtctaatatcagttcgattcccggaaccagtctcgccccaagataactgataaaggcatatcccatgccaccggctgcccccgctccctcccggtctgcatagtcaacgccgattcgctcggcagtgatcgcggcgtaatgcttcatatccgcgtcgatacgcggcatttcctcttcccgtatgcccttctgctttccataaatacaggtcgcccctttttctccgcagagcggattcgtgacatcacatgcaatctgaaaatcacattctttcagttccggcatcagatgttccagagaaacgaaatgtatttttccaagcgcatccgctccctctccggcttcctttccatccttggtcagaaacttcacaccaagcgctctaagcattccggttccgccgtcatttgttgcacttccgccgattccaatgataaatttgcggcatccgcgcgaaacggcatcccgtatcatctcgcccactccataggtggtggcttttcccggatttctctgcgcctcctccacaagtgtaatacccgcggcctgcgccatctccataaccgccgtcttttcatccgcaaggattccgtagtaagcttttacccggcttcccatcggtcccgtcacagacagttccactttccttccgcccagcccctctatcagggcatctgttgtgccctctcctccgtctgccagggggcggaccgtcacattggcatgcggatagacgcgcagcaccccgtcacgcgccgcattacccgcttccatggaagtcatactccccttaaacgaatcgatcaaaaccattacatccatctttttctccttacaggcatgcaacagagacactttgcaatgctcactctgcaatgccttttttcatttttgtccacagtgttgtagggctgatttccagttcttccgcaatcttctgcctgcttccgttatttttgggaagtgtcagcatattaacttcactgacatatccataatcacatctgtttcaaccgtgaaactatcttatacactctcaacatactcataataggattttctccaccagtcgcacttgtgtcacaccattttctatacacgttacctttatatctacttttctttttttatcatgttcgctgttccaatttacaccttgtaaaaactccaacaaacataccgtctccacatggctcgataggttcggattgatgtcggttatctggaacctatccagactaatatggtttgcaccaaaatatctccgtttgtttacggaaacatatctacaaattcggtatcaaaaatatcttgatacattctgctatccatatcgcagcctgaacctcacccgtttacggaaaaagttcaacttttttaatcgtttctactattatagtgattccaacataaaagtcaaatcttgcgaggaaccgccatcgcctcaaccttgtccgttcttcctacaaaaacaggtcaacagctatttttcgtcctaactgatagctagtttccatgcactcaaccttatcatacctgaaaatccagcattgaaagaaagaaccgatcatattacttcttcgcattctcttccagttccagcatgtacttatcaaagtcagacatgaacaatctgtcctgaataacacgatacttttcaaattcagtctcggctttagccttggcaatctctgctgtaatcttacctgcgtcctgaagaacttctctgtcatccgccatcaggaatagatccagacgctttgcccagtcctccattgtcatcggaatgtgacgctctgcacgatcctctgccagatccaggtatgccgaaacgatacgctctaatgaacgcatttcctgctcagaaagataattttttgcaacactcacatcactttttacgatcttgccttccggtgcggctacccaagtggtcagtcccatatgtggcttatctgcgtctgctcgctcataaatcagctctgctgccgtatgtccgtgaactgcataatgcatcttgttctgcaccttagcaaagaactgctttgtcgtttttgctgtgcggtcgtaatcaagagctgtagcatagatgtccgttatcttctgatagaatctacgctcagacaaacggatctcacgaatctgctcaagcaagcgatcaaaatattctgttgtaagcactgatccaccattttttagacgttcgtcatccataacccagcctttgatggtgtagtccttcacgatgccattggcccacttacgaaattgcactgctcgctcattgtttaccttgaatccaacagcaataatcatttgaagattataatgtttcgtatcacgagtgacctgacgtgaaccttcggtttgaactatccggaaattccggatagttgcgtcttcctcaagctctgagtcggaataaatcttcttaatatgctcattgattgtacgaacatctacatcatatagtgtggccatcatcttctgtgtcagccatatattctcatcctcatagcgcatctcaatactgtcctgctgatcgccgacagaggcaacataggtcaaatattccgctgcgctggaacggatggttatttcatctcttttctttttcaaataggggcctcctttataaatcgaaatgagtttttgctattgtatttagctgacttgctatttcgtcaaatggcaaattcaaatccagcgttctgacatcaatctggtttccactcatctgatacacattatttggatatatctcttcatcagtcttggcatacaagagcattcccgaaaccgtgtggcccttctctctcagttcatattccttgtttttcacataagtaaaaatctgatagagattgcccgaatgaagtgtatgcttgtcaaattgcacctgtgtgctgtgctcatagtactttgcgtcaataataagaactttctcaccactttggagcataatgtcactttgcatcacagacaacatagaattttcttcattgtccagctgccaaggaatctgtgatgcatttgcggtaatctgatttttaaactctttcctgtaatattccaagatgaacttctcatacaatcgacacattcgctgctcgtctagaaagtccatcaactttgtgtgcccattcgattgtgtttgcaatagaccctttactaccaggtagcatatcgaaattagcatacgataagtctggttatttcgattgtactgaacattccaatttaccgtatatgaatcaataaaatccacctcgctgaaatacaccattaactttctaagatttttcttgcgctgtttcgatatattcgaacgaaggagaagttcaactgtagatttgatgatctgattcatgatgctgttaaccgaaaactcatcgtatgtacagattagctgtttccgtaacattgactgtgtcttgatggactctgcaatatcaatctttcctcgcagagaagagagcgcctcggtctgcggaatatattctttaccaagtcctcgctttagctgaatcgcgatacctttttctaagatagccgccatcagctcagcagtattatgaaattgttctgtagctatattcttataaccttgctcattcaatacctgaaatgcataggacagcatataatagatgttttgaatcggtatcacttaatcgtactccttagattttcgctccaatctttcaccttcataggttcatcaaaccagtattctttcaataaaggtatcagctcatattccacaacaccataaagccaactatcgtcaattgtatcaggttgtaaattgcagaagtagctgtgaccaatacagaacccttcgcccagagattcatcgacggaaatctctctaagtcagcaaccaccagttcaactggtggtttgctataagccctccaaagggctatgttactgctcgccccaaagggcggtgtcacaagcatttttactggtccgctataaagcggtacttcttgaatcttcttttcttgattcttctgcttgttcttttatatacttctgtactgcctcgtctgtgatattaccgattgtttccacataatatcctcttgcccaaaatgctttatcccacttactctgcaactaatataccacaggaggtttttcttttttatcctcaccgtttccaactattccattctccccagcatagctgggggattagacttttcatttagcttgtttcttgactactcaggaaaaatatttctaccctcgccccacctgtattttcagaatttgaaagtttaatacctccaccatatttttcagccacagtttttgcaaaaaatagcccaatcccataatgggcttcaccatttctacttgtgtcatccataaaaaactgctctgtgccatgcaataatgcttcttttgtaaatcctgatccgctatcctccacaatgaatgtcagccggccatcctgctcctttgcgtcaatataaatgatttcattttcttttgtatgctccactgcattctgaatcacattcattacggctcgaaacattggatcataagcaatcgttatctttttatcactttgtcccgccttccaatctattttctggtgatagatttctgccagtccgagtgcctgttcctttatatctgcgaaaaaatcttctaacatcaccgttgtataggtaacatcactgcaattccatgattttgtgacatctatcaactgttttacataactttgtatctgtgttgtaccgttcaaaacataagtgatattattcttctgttctgtggtcagttcagtctctgaaagtagttctgcatttccccgtacaatcgtaagaggtgttttaatatcatgcgccaaagcagacatctgccggttcttttcctgctctgttatccactgcttttctaatgattctcgcaatgcatcccgcatatcattgattgccgataaacaatcatcaaactccttgataccggaaccagatgtctcatactccaaattctgattctttatttgatcaatggcatctaacacaggctgcatctgttttttgattctttttccaaaacgtatggacggaatgatgataatcgctaccgctccaatcacagacataatactcatcacattctgtggtcctataaaatgctccctcaaaaaagctgaatgatattgaggtgtcaggcgatattgcaatacaacatattcattttcccttacaattactttataaaaatatttcccggatgcgtttccgtactttgcaacattccatgctatctgttcgtattgttctgacagatctccacctattttctctccattctctgaaaagattacataatcacaaagtgcgggaatcatctcagcagtcactttatctgcacgtagaatcgtatcatatgcttcattaatcttttgctctgcataatttgccggataaatacagcccacactaatcaaaaggcacagcagcagataagcaacaatcaccaaaccaactaatgatccaagcatgaccagtacatatctcataaaaatcctgctgagtgcattgcttctctttactcttcccatttatatccaatcccccagactgtttttatcggcatataatcataatccgcaaattttgctcttatatttttgatatgcgtgattatagtactgtcattactctcattgtcaaagccaaagaccgcttccaatatctgttccttcgagaaaacctgtcccctgtttttagccaggaattcacaaatttcgtactccgctttcgtaagaggaagttccttatcatcaaccaatagtttcttttgagatatttgaatacagaccctccccaaaaccatccggacagaatgttccctgtgctctcttctaagatgtgcattgatccttgcccgaagttccatcactccaaatggctttgaaatataatcatctgctcctaaagaaagtccgtttaccagactgttttcctccgtttttgccgtaagaaacaaaatcggacaatccacaagtatcctaattcttttgcataattcgaagccatcaattccaggcatcataatgtccagtaaaatcaagtcataacgatgtaattcttccatattaatttttagtggattacttactttggtaaccagatgtccatccttattcaaaatgctttctatcatttccaaaattgccggttcatcatcaactgccagtatttttgccatagtttccctcgattctattccgatattctgtttccttcccagtggtttacccaccaaaaatagtataccatactaatccctgtaaatattaagcaacctggtatgaatgacaaccattcacctacactagtttctcccaatacagattgcagataagtatatggtactctacccgtccagcagacaaatacatatttccacacataatctccaagtccggtaagcatcaatgcactaattagtcctgatataatccctgctccaatggataccccttttccaaactgaaaagccagaatcagctgccacagataaagtggaacactgcttccccacagcagcaatgctgcaaatatacatcctttcatgatttcgatatcgcttgatgcgattcttccaaatccaattccgaatatgattgctgtcaataggatagagcacagacacaaaaccagtagcatcaacagtttcgataaaaatgctgtaagtttatctggtaaagacaacaggttttgaaaattacctgcattttgttcttgttccatcacacttgctgtaaaaattccaataagtaccggaagtcctgctcctattgcctgataaaatgcaatcactttcatattttcattccatggtgaaaaaaagtaatatattaaaaatataacgctggttataatcggaatcagtaagtgtgccagaatcacagatgttcctttcatctttcgcaagtctgcattaagagatcttccaatcatcttatttcacctctcttctctcaaaccatttcaaaaacagaaccgttacaaaaacaaaccagatgattgagagacacattcccggaacaatgactcccgtatccaaaagaggattccctgcttctgcggcaagtccatttggtaaaacatgaagcaacgggcacatcattcgcatagggattgcagaaacaagtacataccagattctggtttgtgatattaccacaccgctgacggtaataaataggcagacgaacaggtttacaagcattccaaatcgttcacttaaaaataaagctaccggaatctcccataactcagaaaccgtcagaaacaatactgcaatcaacgctcctccaactggaacacgtgtcgttagaagaaagcctccaagcgttgctcctgcaaacacaatcacattagaaaacaaaatcatgtacccaatataaataattttccccagcaacaattttcttctgtctgtgggaatagtcattaaatgatagtattttatctttttctcctgcgccacagaaagataacaaaatagagcaatcatccccggcagcaaaagtgtataccaccagttccaaacactttctgcataagcatttgtcatcccaagagtaaatataaatgccatgacaaatgtaagaagaggaaatccccagataaacttttttcgcatggttcttttggctttttgatgttctgcttttataatattaaccatggatttcacctgctttctggttttttcttaccacattcataaacaaatcttcaagattatctccctgctttaatcctccttcgtatcctaagattccacctgaaataatcccgactttatctgcaagtaactgtacctctgagagaatatgactggagagaattacagtgattccctgttccggaaaagaccggatcagctctcgtaattcctcgatgcctattggatctaatccattcgtaggttcatccaatatcaaaagttccggttctccaagcaatgccattgcaatgcctagtctttgcttcatccccaaagaaaactgtcctgctttcttctttccggtgtttgtaagtgatacaatctgcaagacctcatcaattctgttttcatctgtaccaagcaataattgtcttaccttcaaattctctctggcggaaagattttcataaataggcggattttcaattaacgctcctatttttgataaatctttcctatctaaaagttttccatcaaagtaaatctttcctgcagttggtttcatcataccagtcaacattttcaatgtggtagattttcccgcaccattcggtccaagcagtccataaatctgttccttttcgatattaagtgaaacattatttaccgctttctgctttctaaaatatttacatagattttgtgtctgtaacatcatttccatctttactatccttccttctatatttcatttcttactgaaatataacctaacagaaaaaaataaagatttgatgaagatttattcccgtatggaataaaccatcaattgaatatcattatcagaactcggctttccactgaaatcagcaaagctgttacaaatacgaagtcctaatttacagaatatctccgtgatttcatccaaactatataaccttataggatttccttctttcatttcaggcttataaagtgcttctccatacatatagtctacctgcccatatatcagcgtttttctatccttctcccattcaaaagcagataatgtaagtcccttttctcctgcatcccataacttgcaatcttggttttacagtttcttttctataggcacaaactgaaccactcaatgtatttaccataacatcacctacttataaaactcagaatctgtaatatgaaaagtttcaagatacttatccaatatttctgtattaacaagtacaagctgaccaatcttataacaagccttggcatccttagccacttcttgaaattttgtcattcccatactgtacatctttgcaccatctgaatatcttacaaacttttttgcatcctcatatctatctttcttctttgattcatccattgctgtgctcctttcactttgacttcataacaaatgacgtattttctccataacgcaaaaaagaggacatcttctaaatttctttagaaaatgtcctcttagtagttcatatttgattgaatctttttcttttcagattgtgtactctttcatactgatgtaaatgactatgtcaaaatgcgtcttttaatgcgtcctttgacgtactcaaatgcctcaaccccgcataaacactaggtttatttatccaagctcttcattgtcgggaatacccaagaggataaagtattattccacattatcaggtattatcccatatttgctgcattttcaaaacgtattataaggtattattccgtaccatgcaagcaaaattcgtagtaactttgtagtatatcagttattttgttgttataattcacacatttaatcttaggactctctcctaaaatatatcaagattgtgtgataagttttcgattgcttcttttttctttgcgtctgtgacctccgcatatatatccattgttgtttcgatattagcgtgtcccatgacagcctgaatgacttttacatttgtttccttttcgcagaacctcgtgcaaaaagtatgccgcaggtggtggcaggaaaagtttggaataatgacaggttgccttctctcttttttggcatttatcacttcttccgcattgtaattctccaaaatccttttgattgttcggttgactgtttgaggattatggatattaccgaaacggttacagaaaatgaagcccgtcataccatcaattacagtactattaaaaccattttctttctgcacctcgtattcctctttgaaagcctcataaaccgcatccatcattggaacagtccgaatacccgcttctgtctttggaagtgacaccgcaaactctgactttcgtgtcttgttcccttctcttgcataataagtcacgctatgattgatactgataagacgtttttcaaaatctaaatcgtcccacctcagtccaataacttctccaattctacacccagttcctaataatactgtaaataacgggtgccagtgataaaataccggattgtttgcggtataattcataaatgctctctgctgttctaccgtcaaagcgtgtctaatgcctttattctttcctgcttttcttttgatttctgccataacaccgtcagaaggattcatgcgtattattccatcacgcactgccaactgaaatgtagggtgtaaaaccgtatggattgtgtcaaccgtgtttgcctgcaaatccttttcattcaacaggtaatagtagaaatacattacatcggaatacttaatctctccgattttacgctgtccaaacccctccctaacaaaatggtcatacatatataggtaattagagcgtgttgtcctgcgtaagtcatacttcgttgacatatacctgtcaaaaacataattcaaggttgcacttccagccacatagacatccaatccgtcaagctgatttttaatcaaatctgcttctttctcccttagtgtctgtaaatctctggcatatacaaatctgcgtttcttgaacggatcagtgtatgtatatacataagtgttatccgttctttgggattccccctttcttaaagctctgcctttgttatcttttcttgcttttgccatctctgctcctttcttcaaggaaagagattttgcacctccgcatccggtgtcttaagcaataaatcaacacccgtatgcaataattgagttatggtcattccgtgactgtccgcataatctttcagctctcgcagctcgctgtccgttacccttaaacttaatgtgttcaatttcggggcatcagactttggtctacccattttagccatctgtatgcacctccaatcacttctatctaccattatactttccgtatacgaaaagtcaagtgtttttactgcaaaatctctcaaaccccaaaattgtcacacatacaatctgaacgtttccaaatattgctcaaaaatatcacaatttacaagtaccagcttatcgaccttatatattgcctttgcatctttcgccatctgctcaaatttactctgacacatactatacatttctgcaccttccttgtaacgaacaaatctctttccgtttttcattcgctccactatcatcacctctttccgacataaaatatgtagcttattatctgcccatgacagccgcaaactctttccggctctcatcagcagacaaataatcttttcaaaaaatccatacaggtggcagctcattacaccgcccacatcggtatcgcaccgtcaatcaaatttgaccggaaatctccggaagtatcattatcaaaaatatgtatcctcgccccacacaactgctgtgcattttgccagacattcatcgctccttaccttaacttcaatatcagcaatcaatattccctcgtatgcactttcacaaaataatgaaagcaggtatctcatggcgtgtccgcatagtggctccacatatctcacacgtcctgtatgtatttgtctatgaaattgtcaaggtacactcgcaagctgacgcctgcattttggataaaatcaaatcggacttatcagcccaaaaagcacataaacactctcccgtctgctatgaacggttctgtaaaaattatgtgctttacaagaatgacaagtttagagtttcagcttatccggtccatacttacggataatctgcaacagcaccttcttatgcaccccttccgtctgctcatacatttcacgcaaattttccagctccatcggagtaagtgaattgatatgcggattgtaatcttcccttataaaaagccctccgttttctcccggcttcgtgtaaatcggatactgtggagataaagcctgaatatcgtactgtatcgtgcgaatagaaacgccaagctcctgcgccagctcattcgctgttgtatgccgtctgataataagaatgttgataatctctattctgcgattcatcgtattcatgcttcacctcctctctgttagtcctccaaatttattgtaaaggcagaccccgcaagaactttgcttattgttaaaagtttcttttgcaaatttttttcactgaaatttcatctgcctgtccgtatgttccggcttattatttttctccctctcccctgctttctttggttgactttctcccctccgcttgctaaaatcttttatggataaaatcacaactttataaaaacactcaaactgctatgagcttttgcgggcattccatgtctttgcaagccgtagcagttttttattgcttctgcaaaactacgcagccggacagcctaaaggctatccgaaaaacgggcggtaacgcccttatgtgttataggacactcgcctaagctcgtacaacacgcaaattcccttcgggcaatttgcagaagaatagcaagcactgcctgtgttccctcacaggcaccattttcccaagtttcttccgagtggaaacttgagaaaactggcttgcaaggggcatatccccctggccccctatgcgctgcaaaaatcagtaattaccccaccgggatttctgatttttttacgcttataaaaacacaccgccggaaacggcatatcaaaaattttctatttaaaaaggaaagggaaggattaagcaatggcaaaaagagaaagacaaaatgaattgaaaatctatctaaacaatgatgaacaatacatactcgaacagaaattcaaaatctccggtatgaaaagcaagtcatcctttatacggcacctgatcctgtacggatatgtctatgacgtggactacgaacacctgcgggaatacaacacaatcctcgcccgtatcggcaacaatctgaaccagattgcaaagcgtatgaacgccacgggcaatgtctatgaagccgatgtaaaagaagtaaaggagctgatgaaacaggtatggcaatcacaaaaatccatgctatcaaagcaaccgtccataaagcagtagactacatctgcgatccggcaaaaactgatgaaagtatcctcatttcttcctttgggtgcagtcctgaaaccgcagcttatgacttcaaatttgccctttcaaaaaccagtcaggcagacacaaacaaagcctttcatctgatacagtcctttatgccgagcgaagtatcttacaaggaagcccatcagatcggcgtggagcttgccgacaaactactggaaggaaaatactcatacattgtgtccacccacattgacaaaggacacgtccacaaccacatcattttctgtgctgcagataacgtcaatcacgaaaaatatcacgactgcaaaaagagctattaccacatccggcacttaaatgatgagctgtgcagcgagcatcagttatcggtcatttctccctccgacaatcgtggcagaaaatacaaagaatggcttgccgacaaaaatagttcttcatggaaaaccaagctcaagaacgatattgacgaagccatacagaccgccgatacctacgaggattttcttgatcttatccgtgcaaagggctacgaaataaaaggtgaaacctttggtgagaatgacttaaaatatatctctttccgtccccttgacagagagcgttttgcccgtggcagcgtcaaatctttaggtgcggaatacaccagagaaaggattaaggaacggattgaagcgaaagctctggaacagtcccaaaagcgtgttccttttccccgaaaggcaaaacctattatcaaagattattcctccaaaaagctcattgacacctcagaggagaagtttacacaaagtcccggtctgaaacattgggctgatattcaaaacctcaaaattgcagccgcaagctacagcggagcaggctccattgccgagcttgaaaagcagcttgctgccaagtctgcccttgccaaaaccgcacgaaacagccttgtggaaaccgagcatcagcttaagaatttgggacagattttaaagtatgccgagcagtacaaagccaatcatatctatcatgtccgttatcagaagtcaaaggatcaggacgcatacctgcgccgacacgaaaccgagctgctgctccatgacggtgccgaaaatatgctaaaacgatttggcattgacttaaaaaaccttgatgtcgaaaaactccgcagcgattacaacgccttgtattccaagaaagaaaccttgcagaacacttataaatctgcggaaaaggaaatcaatgccttaaacagaaaacttgataatctaaagcagtatcttgaccgggattcacaagaccatcagacctctgaccgcaaagcagaacggaaccagaataccctctgatcaggcattaaaaaaggtgtattgtattgagggtttttacctcattgcaatacaccacaatatgtgcagtaagtcatatttgattttgttttcaatatgtaatacctgtctttttctctctttcttctttttatcatgtattctactccatataaaatctgtattctactgtaattcattcctgacgatgtgtattgtaaactactaaggaggtgaattataatgcaggacataaaacaaaatcttgccgatgcaatacggaaatcccgtacagaacttgggctttcgcaagaaaagctggctgagattttaggctttgacagccgtactatactcaatattgaaaacgggcgtggtaatccaaaatttgaaaaactgtatccccttgtcaggcatctgaatatttccgcagacagaattttttatccggaaagcgtaactccacagcctaaccttcagaaactctttatcatgctaaatgactgtacggaacaggaagttgccgagctgctcccagcggttcactatctgcttgcgctgatgagaaaacgggacaattcagaacaataagaaaaaccaatagaatcccatttgcggagctattggttttcttcttttcacaacttctacattatcccttatatacatctttttaaatatctacataatcatcccttaactgcaaccaatatttactcttttttactgcctcatatccgccaactatatctatctttccatcgtctaataccacaatctgatccacctcacttaatacttcttttttatgtgtaatcactattaccgttttatctctaagcccagtgtgcagtaatgcattaatctgttgctctgaatatgcatcggtgttggaagtagcttcatcaaatataatgataggtttatcatggatcaatgcccttgcaagggctatcttctgtttctgtccgccagaaagcattgcaccattttgacctaccacataatctaaggatacttcttttataaaatcttctaatccactgtctctacaagctatttttagcatagcatcgcttacctgcttataaagacagatattattccttatgctgtcattaaaaagatatatctgctggctgacgatggaaaccatttctctatatgcctgtaacgacatatccgcaatatttgttccattcagtaatatctgcccattttctggttcatagagcctcgtaagtaggttgataatagtagtcttgccagaaccattcctgcctataatagccgttttgcttccttttgtaaatataacgctcacaccgtctaaaataggctttccctcctcataagcaaatgatatattctttaactctatatctccaaactgtggggatgttgttatcttctggttactgttttcttcgtctagttccataaacatatagtatctttttgtcgatggaataatccctgacagcaagtaaccgatgttcaagatggcagaaattggtcctgtcacatatgagctgtatgtaataaatgcaaaaatactaccaaccgaaagctgcatattgaatactagattagagccaactatatatatcagcgttatcaacaaatgtactaatacatcatccgccgcactattccactgactaagcatattcattttcttctgcttgcgaatcactaccctttgtttttcatcaaactctctgtgcttgttgtctagtatatcaaagagctttacctcctttacaccgcccaccgtatctccaaaccaactagaatatttttcactgtcaaggataaattcatccatgactttcttacggtattttgcaaaatatttcataacaacagccttgattggaataaacagcaatactaaaatcgtcatacggtaatccaatataaaaagaccaataacccctccaaccatgctgaatgcctgtgtcacaacaaaaaatgcactttcatccgcaacggataccatatttgcaatatctacactaagattattaaatatttccgcagcatttctatcatcaaaataatttattttcatcctcatcagatgttcatatgcctgatgccataatgaatactgtactttagcaacaatttccacacgcactttctctttgataatattcaaagctgatatgagcatatatatagcaaaagagcctactaccaaatataacaaaatatttttattgccgccaataaatccctcatccataatttctttactaataaacggaatacataaatttaatccggtagatattaagagacatccaaatattatgaaaatttttcttctgtgcccatgtagcaaatatgttaatttatgaattatatccttttctgtcattcaatcattactcccttgtaagcagttcaataatatactgctctggtatacctttaattttcttaaacaccttgctttcttcttcactataaacagagatttctgcatcatctgcatatatatatacatcaggctctatacaaatttccgtttgaatatcctcttttgagtaattacccaaatcgcagattaaaatatcatattgtccataaaatatttcactgcaaatatatttttttatatcagttccttttttcttctctaccggaatatatctaagtccaatgagttccccaacaattttgtcagttataccatatgcgttgtaatcttgctcaatcattttgcggcatagttcccgaaccttatttagcgaatcacagcctttaacaaaaattactggtatttcaatatcttcattatcagtatatgagttcagttctatttgcctttccctattatatcttgaccaaatataacaatgatcgcttgtcatttccaacttatcatttcccaagtatattatatttttccctgcatcaagataatgctcaatattatccatttctccaagaataaccgtatcagaactgtctaaatcatctgaaacacaaaaactgcatattctagaaggcaactgcacatgactaagatacgctgttctaatccaatcaacataaaaacaatttatatctatttgctcctgtgaaaaaaatcgtctaatataaaatggagtaatacccttaaaataaatatcagcaattttagaagttacataaggcgttgcaatactattactagctcttgtctgatgcattttaccatcaacaagaactgtatcgctcccatatgtttcaacaatgccaaatccaagccctgcactataatttactttatattcccgcctttttaatacatcggattttctcactgcaatcacgttcgtaaatccggcaggatatgttgcaaatcctgaattagacagggcagccacaataatcaaacctgaatacgcacactcgttaatgatttcttgcagcaatcttctgtctttgaagtatgtgcttcccaaactcagattgataatatcaacagcattatttttacaccattccagtgccaaaagcaaactccctacttcacccttcccatatgaatccaaaatagtgatactgctcagttcatatgatttttctatgtttgcttctattactttggcacaggatgatccatgcgacaatttatcactttcagatataaccaatctgatttcattaccaacaacttccatatttttatataaatgaacttgtccgcaaaatactccgttatctataatgcatacatgtactttattgtttaccattaaaatcaccatattcttttacgtatccaatgatacaactttatttatcaaaatttctctgcaatactaaaaccttaaagcatatattaaattcgtttttcggtttaatattccgtcatcaatgacataaatatgaatcttcttaattgacattcttctctccggtttttcttacaatatatcctaataggcaatcatatttatcaaagtttccgtctaatacaagtggattaaagtcaatatgaaattcgttttctaattccatataaagtttcaataaatcccttgcctgcataccagcactatcactcaacaaactctttgaacgctgatcgtttgtaagtctattaactaagtaacccattttttctataaaaatatcatctaaccttttctttatgcttgttctgttatcttccatatgcacctcacataaaatctaatgaaccatattcttccaatatctccataacccgctcaaaaaatagaccattcatcacatctgcttcattaaacagcttgttttttgtcagtaaatcatcatatattttatctccatgataatattgtatccatgcttcctgtaaagacgattcaacaattcctgtatatgtagcataaaacaaatccggaactgcaccaaaacggtatttacaataactcttctgttcttctaaaaattcatctgtatatttcagattatataaatttaatatggatacatctggcttgattgcggaaaaaacaatgctggctaagtacccgaaatccaatttatgtttttggctcaattccattgtttcaccaggaacactaatcaatacaacatccggctgttcttcccggcataatttttcgatgtagtgattaattccataaattttttctgaaaaactcatgccattctcaaagagaaactctggaaatatcctagctccaaataacacaccttccctacgggagcttatatataaggttttgtatccagcactcacgaagtcatttctaagtttgagtcctacctgaaacttctgaacatatggaccaacccccgctatgcttacaatgggtatatcaaagttatgtaacactgtacttatatcagcagcgacttcattgcaaataaacgatgtacacacctttaattcgtccgacatttcctctatagcctgtctgtctacatctcgatcatccctagcccaataaatctctatgttattctgtgctgctattctaataatatcttcaataaccctatgttctaagaaatggtaggaattaacaagaacaagcacatctaactggctgaaatcaaacttatcaataacatttataatatgattgggacttgaaatattccagccacccaatgtcaaataatatgttattttttgttgccttccttccagttgtatcacatcattattcggcaagcgcatgaaatcctcatctacaggaaaaactgccgcacatggctcattcgtattcatatcaattccccctcaatccttctccaaattttgaatgatattcttttagtacaatataatcctttatactttcctctgcattcatttttgaacttttgcatttagctaatcttttttcttttgacagtttatcaccatccaccgctgagcggaaacattggatacagaattgaaatgcccaacagttcttacattcattctccgttaatttaccaatgtttagcagttccctgattctgtcaaaatcaaatccactcttaatattacctatcttcgtaacatttgcactttcatcaacacgctcgcatgggtaaaaattaccatccgcatttacaaaaaatttatgcactccgattaaacagggtcctccaggatgcgcaaatttcttatttttttcaattcctacttccctttttgcaactagcttttccaactgttcaatataggcaacagacagcttgcttcctatcttatctaatttaccacaactacataaaaaattcttgaacatttcatattcataagctatggaaaatgtttcatccttttctaattccttctttaatccatctgtactgaccaacactccatttgctgttatactttttaccgtttcaaagttcataaagaaatcatttgaacaactaaaatcattcgttgggtccaatactgcattgaaactgacatgccaagaaaaatcaggatacttatttaaaaacatttctacatttttcataactgtctcaaaagaaccactttttccgtctgccataaccctattcttatcttgtattacttgaggaccatcaaagctaatggtgacaaaaaagttattttttacaaaaaatttcataatttcttctgtcaataatgtagcattcgttgtcagtgtaaaacttaaatctttgccaataaatttcattttcgcatactctacacatttctttaataagtcaaactcaagtagaggttctcctccataaaaaccaatgcctattgatgtagtcatactgctatgtgcatacaaaaaatcaatggcactttttgccgtttcaaatgacattcgtttattactgtgaacccggttggaataagaacccgaatagacacaatatttgcagcgcaaattacaattctgcgttacctgcaatgtcataatcctcatacagttatttaaaatttcttctaaattcgtaccttgcggatattctatttcatagccagtatctgttttactgaacaaatcatatttcaaaagcctacggacttcatcttccaatttatgaggaatttcaatttctgcttttatattttcattacttttgaaaaaatcaaataaatcattgcttatatttacaatcatttttgaatttacatcatacagataatacttcgtatgtaacttaatcaaatggataaatggtgcttctactttcatttgtacctcctattattaaagggagttaaattgtcaaaaacaagcacaatctaactccctttgcacattgtagcaaaagcactgaaaaagtcattttttcaacaatctacctattcattgaaaaatgactttaccagtaacctgcattacagccatacaattgtacctgctgaatcagcctttacatctccctgaaaatagtttccagtcggatcatgacttgtgcttgaacatgtacatgtaattgtaagacaggtacatgccgaagaacaatacgcagacaagctattttcatgtacttttgccttctttcctaattttttcatctttttcacctcctcttctataaatttatggtcataatacctgacaaaagtcaagcctttaccatctgctgtttaattatttaagcataatcagaaaatcaaatttcttcctctattagattttaaaatcaaaattttttccaacttctgaagatgtgttggttgtaacagcttctctattttgggctgcatcaataattacctgcatatcttcattgtcaaggtacacttccccatcagtcgcattttccaacttctcggaaagcagtttttccgccctgtccttcacaatttcattttcatcctgaataccttcagatattgctattttttcaccatcttctttagcttcttcagctttttcttccagcttttccgcaatctgttctgctttcttacgtgcattttcacgggttttttcaatctgcttttcggcattttcctgcgcttctttacggagtctttcgttcatctcatcttttcttatcgaaacagaaaaatgagaaagatttccgttttcatcaatataatcatgccttacaattacagtggaccctactgattttttataattatcgagccattttaaagcagattctacatcctttaatctctgtgtatactcctttgctgctttcggatcattctgcattttctccacaagcttggggttgacatctacaacattcactttgccgtcattacttgtattaagcccatatccaatttgcaacttcatatagggcacttgcttttgcaaacttttgagatattcttcattgttactcttctttgtggtttccgtttttacctcagatatctcgcttgtttcactttttttagtctgattataagtatacaagttttcataactatttgtataacttcctacactagaaattgccataaaaaattcctcctatcttataaattttcaatatactttaaacttttatatcaacatccataaatggatgttgaaacatttctcatagtcaaagtctacactttccagcttccccaaaaacatatccgttaaaaagtgaagaagtgcttgtgccacttgcactcactatatcataatcacaattttcacagaattattgtatttctccgaaatcttaaaaaaactggtcagcaatttttcaattcccttttcgctaatagttcatttgaaatatttttcagagtaaaaaaatccggattatttattttttctttatcgaatactacaccatatcgttcttctatttcgactagaaaataaacaatatctcttgcattcattgcatactttctggaaaaaaggcattcatcatcacacaattcgtctagtttctttcccgaaatattttccaacattggtttcaattcttccaccatatacttttcctccttagagtgtcggatagttgtcatatcccaccaatgtattaattaattgctcgctaaactgtttaatactatctgaatcatacacagagtaagcattacatttccttacttcttcatcaataaaatttttatccagtgttacataagtaagagtatccaacgattctgttacatcccaattaatagaactattcccaataaaaaccgcatccacatcatattcatatttataccgcaacgaatcaacgatagcattgatataatccctattataatctacatacgttgtcgccaatacaacataatcgggaacaacagcgtttgataccataaaattcaaatagccaaaatcattattatatttctcgctgtagggcattaatccaccaggcacacctataatgataacatcagcattttcagacttagacagctcataaatataatgattgaacccaagtatcctgtccgtcacctgcaaattggaatacataaaattggggaaactgtggaaacctaaatattcacaatatccttttgttcctatttgcgaaacagtatatccttttttttgaaagcactctcttacaatcaactggatgtcaaacttatttgtcctgtccccagttccaatcacaaggacaacaggcttatctattttcttaatctctgttccatacagcttatcatctctttttaagcaaacgtcatttccattattcctcatatcaataatttcaatattcaaactttttgctttatcaataatcgttctgaaacatttatcgtctaatgatataattgatggcataaggaacagcttttcaatctgattgaattctatttcctgttcatgcttcactataatacctgtttctattcctatcttacttccagcatccttgcctacatacccccagccatttggtgatgccacttcaataatttcaaaatctggaaatttgtgcataatcatatgtaatagcgatatatcatacggatacatcagtgccctgcttgcagctgccatctatttcactcccttctcagttcaaatagatcacatcatcgtccaatccactcatttcatgcaaaagacaataatctttaaaatcattttctatgctttttcttactccagcacaatgtttttgttttaattctcttgataacccatcgccctgatccaaatgtgcagtacatatataacaatattttgcacaccaacagtccctacactgttcctcagtcagttttccaacattcaaaagcgtctcagccttatctaaatcaaatcccttatctatattccctatgattgtatctgccgaacactcacaaactttctcacatggataaaaatcaccctttacattgacaaacagcttatgtgtacccggaatgcatggtcctccgggatgcgaaaaatcttcaacaaaactgctcatttttctctgtgcatacacagttttgatttgcaaatagtatgactccacaacctttgatacatctattccttctattttttctgattttgaatagaacatcttaaacaactcatattcgaattgttcaagataatctttattaggaacaaatttatcattatccttaatcccttccctcgaaagagaattgaaaagaaccctatattccttaagcatatcttcattcataaagaaatcatttatacactttatatctgatgtgggatcaagcacacaattaaactggacattatcttttttctcaggatatcgtttatataatctttcaatattttgcattactatatcaaacgaaccgctatcatcaattctgtgcctattgcgatcatgataattcctcggtccatccaaacttattgataaattaaattcattctccattaaaaaatcaattacttcttctgtaagaagagtcgcatttgtagtcataaaatacattatttttttgccaaaacatttttctctacaatattcaacaattttgcgaatcaaatcatattctattaaaggttcccctccataaaatccaatatgagcaacaggaatatcaaaagaatgtgcaatataaaaatcaattgcttgtttagctgtttcaaatgacatatgcctgttactatgctctctattataataactccctgaatagggacaataattacactttaaattacactgctgtgttacctgtaaagtaattgattccacagaactatgcaaatatctatccaacatcttagttgcaggatgttcaatcttggtccaatgacgttccgacagaaaacccgctctttttagttcatctattatatttccacattcggattgcgaattaggacaatccttgtttttttcccattcattcagaaaatcatatacacttttattaattcggactattgcattggtattaaagtcataaaaataatatcctttcggagtataaaaagtatgaatataaggtactgacatttattttttctcctatagcattgcggcatccaagattagatgccgcatgttttaaacttaatttgttggtgtctttctttctgaatcagatgcctttgcattatagctactcgtgcctgaaggacatgtccccctagcttgctcatctttgtcatcttcttccgtaatcagaaacctccgctctatcatcgctccaaatgccatacgcataggtactgaatatatgcttcccttcacatatggcatctagagtttagatgtcgcctacttcaagccctaattcgttggtgcttttctttctgaatcagatgcctttgcgctatagctgctcgtgcctgaagggcatgggcaatttgaacatacgcagaacttgtatgcctgcaaggacctcttatccagagtaaccttttttcctaacttcctcatctttgtcacctccttcctactacaatatatttatggttaatatatattgtatatcaagccattgtgattagcgcaaactcaatctttctcatcgcttttttatctgtcttggatttaagaagttttatcagaactcttatctttctctttatccttgtttttgtccttgaccgtatctttatctttgaacttatcacccactttttcatccacggtactaccaaacagcttcgacagcgtgtcggaataagccccgctcttattgtaggtttgatccactccctttgtcctcgccgcagcgctggatatcgccgaagctttctgctcaatctggctagcaaatgagccataccctgtaaacagggattttaaagtagaaatattgtcaaactcaataccgctttctcctaacgttgtttttttcttcaagccttcctcatcaaactccagcttattgccctttccaatggtaatgcctactttcgagagcagattgcccgccttctccgttataccggtcatccatgccgcattgcgcagcacattcttcgtttctgaatttcctgcctgttctaccaccgaattgtaatcgtcaacaaaggttttaaccgcctttgtgatcgcatcccagtcataatcctcgacctcgatttcttctccggtttcctcgtcctttttcttgaatttctttttctcataaagcgagacatcgcccaacacttccgcagactttttcagcgagtccgcactggaacgcatcagcgtcagtgttttggaagaatcaccgaactgtgacagcttatccgcatcctgtttcgcataataagccttcatcagttttccatagcttccgtttttaatcatggcatagtccgacacattgatcccgcccatgccattatctatatagggagcaccgccgccaaataacgaagaataatccatatttgtgttatatttacttgcgtagtcgctgaaactgtttatttctgacataagccttacctcctttacaaacggacatcaacatgggtataaactgctggctgtgccgccggagtttctggaacggctgtttgggcaggctgtatgttctgtgcctgtgcgccgttatcctgctgcacattttctatatttcctgtctgtgcatctgcacctgatatgccatcctgcgctttctctcctattgcaccgctgtctgctgtcttttcggtcttgccttctgcctgtgcctctttttcctcttttgcatcagaagttttcttctcagtgcgttctgctgctgcagcttcgctgacagccttattagcctctgcaagtgtattcatctgtgaggctgttgcatttacggctttctgttccaaatccgccagctccgcttccttagcctctgtacttccactctgctttatttctgcctttaaaacattcgctctgccctgcatctgtgttgccacgctgccctgcacttttgcctgcttcatggaagaatctgcggaaatcattgcctgcatacttgcctgtgacagcccgcttcccttatttcccgactttgctgctgttcgatttccgccgagcatatcgtccatagatgcacccttagactgctgttcttttctctgctcaatctgatgctgtctaagctgcatattcaagtcgctgatctgctgttgaatctcctgacgcttcttcatcttttcttctaacgtcatttcctcgttggaagaaagctcctgtaactgtttctgtgcattggcaatctggttctgaatgttcttgctgtaagaatccattgcctgattcatccctatctgcgctgcctgcgtatttgctccactaattccgttaattgtcattgtttcgtcctccttgataaataaatttgaaatccctttcccaagtagcctataattaatgttatagattttctattctctaacaaatttatcggaaaattacttgtgctaatcaaccgatatgttgtgaaccgcccttatttcgttgtaaaccatttatacaatctggagcatgattcccaccgtcacctcatccccattctgctcaaatgacaagtcacccatatatttttttgccactctacgcatatttttcaagccgattccatgctcaccattcttcttggcagtatacggaattccctctgccgggtcaatccgaagcctgcccttaaaactattgctgatgatcaacataaaaatactgtttttacggaacgcatggactttgatataaggtttttctccatttaccgattccatgcaattatttaatgcattatataagataatgcagacatcaaaaacatccagctttgtattttccggataacggaagtcacattcaaaccggattccacgcatctgtgcttcgttgcttttttccagaaggatcatgtccgtaaccggattacctgtcctgatctctggcgtaagctcctgccattcacttttcagccttccgagatatgcaaaagcctcgctgctgttatccgcacccatcagacgctctatcatctggatatggtttcccatgtcatggcgcatagcacggagatctccatacaatttttcaacttccttaatatgcatttttatattgtttatttggctttccaaaagttcctgacctaactgttcttcctgtaagcttttccagttctgaaagaatacaattatcacaaggattgctattatggacattaaataatataggaaacacagcacatcataaaatcctgtcatttcggattttacctgataaaaatgaaaaatcatatagccaaccatgcctaacaacgatggcacaatcagcatcaaaagttccttttttcccatatatctgttcttgtactcataagctctattgacagtctgaatggacaacagcaaaagtagcgaacaaaacagtatatccataattcttgtcattacatacagtccataatgcagccatgacatcgccgctatcgccgaattgaaaagaacaatatccagaaagaaatctataatccctgccatagaagaggacagccaacgcagcgtaaagaaagtgaccgacaaaaatattttttgatttatattctgcctgtcctccacatacatcacggcaaatgccgccactgttccaatgaaatatgcaagaatattgtctatctgtggcggcatgatatataaaaccgtcattaccaccccatacacacttcccgtcttaactgctttatctctgccctgcatatagggtaatacaaatactccaaaacaaacgccggcagcgataagctgcacaataattgatatataagatgtgatattccaacataattctatcggactcacttgatttccctgcctttcctctgattatatttcaaatactgtttcacaaattcaggataattctgtttagcgattaacactgttcccttttccatagtaacagatgcagcatcatatctatgtacaaatctaaaatgaataagatatgaccgatgcgttctaaaaaaatcctcccctgcctttttctcaagatttgacagattgccataatattctgtatcgccgtttacggtatggataatgacttttcggttgaacacttccgcatagataatatccttcagcagtattttcgtatggactcctcctgcctgtatcatcatatattcttcatcaagttctccatttcctttcttcctgctttcaatctcctgaaccgcattttcaaaaacttcacagaatttatcatctgacaaaggtttgaccagataatgaaatgcacctacatcaaacgcctgaaagacatattccggagccgctgtaacaaatatgatgagtgcctgtttccaatctctacgaaaaagccttgccgcttccattccgtccatctccggcatctgtatgtctaaaaacagaatatctatttgtgtttcgctgtcaagcagttcctgcgccgaaaaaaatttgcatactaccgcatccggcagcatctccttgattttttcttcaatcatatcacacataaactgttcatcatcacaaactgcaatgcaaattgcattgtaaactgcattattgcctgacaagccagaaaaagcgtctttggcaatcgtatgctccatatgcatcacatccttctataatttttcttaaattatatcacacaattccgcatctgcttatgtatgttgtaaacaacccttattttgttgtgaaaaaaattcctccggcaataaatcatttcggggttcaatttatcggcttgaattaaccgacaatattctctgccttgcctgctccctctgctcttattcaaagatattcatacaataaaaaagcagaacacagccacaaaagccatgctctgcccattcaaattttactctgctactataaactccagctccgcaaattcctgatccgtcaagtcaatcagttttacaatcacccgaagcgataattccatcatctcatcatcttccaaatgctccattgcatcactgatactctttatgacctttgccctgcttcccaaaccggaagctgtaccttcttccgtataaatactgattaaattgctttcttccacggtaaattcatttttcattgcttacatctccctctgattatttttactgttttcctgtgcatcatggtcttgattctgtcctgccacctgtgcttttttctcggcaaggcgggcttttagagaaatccttgcggcaggctgttcttgctctctctttgccgcttccttctgtgctttttcaccaacaccgttattaaaggaactgtccccagttccttgcacatcatcgaccatgttatagttctgttcttccatgccatttatggcattttcttcaatcttggcaaggggcgtatactctgccagcttttcaagcagttcttttgcccgttcttcttcctccggtgcagctccttcagaaatcgcttcatttagccattctgtgatatgttccgtatctccctgatttaacatctctgtaagctccgctatattctcggtcatactatgcacatcattacgataactatatatatcataatcatacacaaaacggtcaagctctactgcaagctgccccgccttatccagccccggcatacgcagttcccaaaccctcgcttccatttcctctgacatcacaccgtctatctccatttccggcagttttgccacaagctgtgcaataacctccatagccttcggattgttcttaatatcagggatatgctctaggatttcaaggtctatccgtctgcccgataaaatgtcaatctcactatcctcatagggttctgttcccggtaaatggacattgataccgattgcgggtatggcgttcaaacgctccggcggtatctgcttccagattgcaatggcttcctccacggtggaaatattctcataaaattccccgtaattatgaaattcgctgcactccgataccattaaggttacttctacttctttttctgcctgctcccttgccatcctgataccttcaagatactcctccacctgtggaagataggtttcaaggcttcccgtcctttgttcagtaatcgggttaatatccacctttatcccgccgatatgaagtccgtcctcattaaaagtgttaaataaatcgtcctcacgctcatttgtggaaagctccactaccacatcaaggtcagagccttcacgctccaatccccggcatctgctcccgactactgcagcatccactatttgtgcatcaatgccatattcgtctattttcgcctgcacatggactttgacggtttcctcaatctctgccggattcatctcgcttatttcatggaacagctcatccgtctttgccttaaaatctgccaccacactgctctgtgtgttctgcatattcgtaatagtggagccttccacacggtcagcgtacatatttttaacaagcagctcatcaaaatccatcggtatcagcttgctgtctttctcaatgtttccctttgcaccgttatgatccggttccgctttcaaatcctccactatgtcattcagtgcttccctgatactaatatcaggattgtcatacacgccgccgtctatttctttataatccatacccataatggaataatcatagccgccctctgtttcctgtatggtgatatagcggtctgctatctgaaatgcaagctctgtttcgtgaggttcctccttatcttccattcccggcttctggacatcgtgtccagaggtgtcctgcctttctccttgtgcctttttcatctctgcaagcacctgttccctttcctctccgagatcaataatttcgtccccgtcctctatgctctccgtttccggcttttggacactctgtccaaaagtggcatcttccgcaatttcttcctcctgctcctcagtggctcttgcctgctcaacgtctttgtactctcgttcaatcagaccgagaaaagccgtccccatttcttcataggaaatctgctttttggcattcccgaaagtgacagtcaccgcatcattcccaaacactgcaacggcatcatcttcgcctattcccattacccgttcatatccgccgataagagcctttgcaagctccttgcgaatatcctcgccgccatgcatacggcgggctatatcatatatttcaggctccggcaccatgccatcgccatacaacgctttttcgctcggctcgaatctgtcgatatacccgtcctcaaaaaaacgataccccaaatcttcaatctcatcccatgcaagaaactttttcgcaatcaaaggtgcattgtcagtttcaaggaattgtttttcttcatcggtaagctccatttccgctttgtctgcttcctgcgttttttcgccctccagcgtccttgtaaattccggaagctccgtaaatccaaaggaatctacaaaatgggcagtattttccccgtcctcatgcagcaccacgatgtcgctgacggaaagggaatgtcccttgtagtctgtcgggtgatctatattaaacttttcaaagactgcttccagcgtttccccctgcgtctgtccttgcagttcggacagttcacccacataaatcaggttgtaattctcccgtttaatggcatcaaaattgtactttgtaatgcccatgcgtttcagtgcttccgtcccctcaaagcggaattgtcttagctccggatcatcttttaactgatatatcccgtatttatccgtgctgccatacaaaagccgggtttcctttgccgcttcattctccgaaagctcctcctgcattgtgaggaaatttctctcattctcccaatcctttttttcaatgccaaagattccctcatgctccgttatctgcgttctgtcctccacggttgtttcagaaccgtcctcatgcagtacatatatcggtaaatcatgctcaaataattccaatgccctctctttcgtaagcggcagcatctcattccatgtatatccgtaatcctccatttccgacaagccgatcatagggtcgggaagtgcatcaatctctgcctgtgcatcaatgaccgcaagggctgctccctgattgccttccgtttcctcataatagatatgttccgcaagctcccttgtcttttccatatcattcagcttataggcataatttacaatcaagttacgctcatcatcggaaaaagcggtctttgcatattccagacggttgatgataccctccgcctgctgtgccggggaaaggtggttcatcattactacctcttttttattcaggtcaatctcaaagtcattaaactgcggcataccggaatttctgccgccgtccacaatgatagggatataatcagccccatagctttccagacaatcatggatattcttcctgtccttttcttccagctttgtaagcgcacccatgatttcctgtacttcctccggtgtcttattggtaatgcgctctatctcaaaaccttccgcatgggtaatcttcaaaatcacatcatccgccccgattggctcctttgccctttcttcccatgccatttctttctttaagtcaattatctcatttgtatcggtaatgtaccggacatcaaggtggtactccccaaattcccttgtttcctcattggcaatctccgtagtccatgcacctctactttccaaatatgcagcaacactcagcctgtcatcatcgttcatggcagagagagcttccataatctccgccgcatccattcccctgacatttacaaggctgtactcggacagatcactgttctgtatcagcagacggctctccttttccagtccatttatggacttatcctgcatcaaatcccggtcacgctgtatttcctgaagctgcccttcaatgcccttaataagctccgatgaagttctgcggattgtatcaagggaagatttcagctctttcatgtcctttccgctgctccacccggcaatatatccgaaagagtaatctgacgtatctatgccgaagtgctggcagacggtataagcgatgctctccgcttccacctctttggtattcctgtcctttacaggtgcgtcaatatcctggctgatttccttgttatgcagcatagaatgtgcggtttcatgcaccattgttttcagtgtctggctctcgctcatgttctcctgcaccgcaatccggttttccgttgtatgaaaatatcctttggaatctccgggaatgtcctcaaagccaatgggaaccggagccacattcataagtgcctgcacaaagttctcatagccttccactgcagacaaaagctcctgcgcctccagctccggtatgggcttgccgtccgtctgtgacacgtcaaagacagataccacacggaatgccgggattgtaacctccacttcctctttctgcggcataccgttttcatcaaaggtcatttctccggtcacagggtctaacttatcccgttcctccttgatcttgtaaggcatcggggcaagaatacggattgctttttcgcctttgttgacgtgtctgccaaaatttttctgccacgccttgtagcctgccactaaagtcgcctccggcttctgcatggcgatcagaagcgtattgttaaagctgtaattgtggaattttgacatagtggagaggtaacttttatacttttcactctcaaaaagctcttttaagccttcctccagtctgtcggtgatctcttttactttctgtttctcggtcatatgaactgtgttcgtgttgatgaccgtgtttgtattattatctaccatagtttttcctttccagagcttttactctttttgcacgcaaaaataccgccctgtaaattcacaagacggtattcctgaaataaaaaaggtgcatggctattgatactctttccatacaccttttagttgctattaaattgtattagagcaagcgcagcagctgcacaagctcatgcggttctgttgttcccgatgcagtctgacgtgtatcaaactgtgagaaactgttatcccggtaaaacgataataatttttcctctttttctgcttctaagaatgttaccattccgccaaacatatattgtgttttttcaattatcatccaagccagttcgataagctcttttccggcaatctctctgttcctgccatctgcataatttttcccaagctgagctataagataagcagacatggtataggtatccgactttacatctaattcactaacccgcagcaattttcgtttcgtggtattgcttactgtttcaccacggattgtcaacggctttaatgcaagcgtaaaataacctaacatttctccattatccttggaaaaaacaagatatgtaaccgactgattttttttggtaaactctattgcattttttttcaaaaaatgttctacatccggattctttggacaagaaaatccggagagcaattgaataagcgcaggctccccggcttcatggtcatctcccaatgccaaatacttacggatattgattgcaaaaaacttatccgttattggcatttaatttctcctttgctttcttttctctaaacctcataaactctctcaattcatcctcagtttcaatgaattttacatttaccggagtacggacaggacggtttttggcagattcttcaatcgcattgacgaacatctccacctgctccttgccggaaatgacaaaattcttcgtgatacttgaagttgccatataaacacctcctttattagtatggctcatcttcggttaaacatacttctctaactatattttattatccaactgccgtttttgcaacaaaatttttatgaattttatatgactgcctcctttcccttttctttcttcttttccatatccggctgcctgttctgcgttcctgccttttcctgcatttgtgccagcttttcttttaaggaagttcttgtacccttttccgctgctttctgtggctcaagcctgctgtagattttatccaatttttcagacattctatcaatactgtcaagattctcttccagcctagcaatggctttctttacaggcttattaactgcccttgtcagggcaacgcctgacttttcgtcagacgcctcttttgtgccttttccagccaatagtctgcccacgttggaaacgctgttcccaatctgctttaattcatctccaatactgtctatctggttagctgtctttttgtagtccatcatcacatcaaccagatgctcccggcagtctgcaagcactgatttcacgccagaaattcctttttgtaacactttgcacatttccgcctttcctttttccttaaaagcattgaatgcctgtgttgctgtttctgctaaatgatcttttactgctgacaagcgttccgacaggtttgcgattttctcctgaaggtgtgtcaccttatccacaaggctctctgtgaccgttttgggctggttttcccgcaactgtgagagctgctccttgacaccctgcagctcgtctgtcatcacggcaagctgtagctgcatacctgccacatattgaaaaagctccataaaatcttgtgactgttctcccatgccctgccggttaagcagtcccatgaactgctttagcgcatcattttcctctatgttctgttgtgtattctgttttgctgtttccattcctgatacctccatctgtttttattcacaataaaagcagccatttctgactgcttttttcgtactgccatatttttttaacactctgcaacaccctttatcttttctatccttgacataaactgctctgaaaaatccagttcctttaataaagactcgtcatgtgaaacaaatctgtccctgtatctgttcataatgtccagcatcattaaaaagcaatcctgatgatacaggaaacttatcaagcagaacagatcactttctttcagtttccctattctgaaataattttcaaaatcatattcatttgcaaatttgcagaacactaattgttccagcagtatgtccttatcctctttcgtctgtgaaaataattgttgcaatatttgttccttttccatattttctccttttgcataataatctccgattttggtaactataatcatctccattataggagcataataaaacatattcaatagaaaaccggaaggaaaatatcgcaaataatgataaaattcgacaaactctttaaaaccttaaaagaaaacggtataagccagtacagtctttacacccattacggtatcagcagggcgcagattcagcggttgaaaaccaaccagtctgtcactacccacacgctgaatgtgatactgaatattttaggcgagggatttacccttaatgatattgcagagtttacgcctgatgaaaaagaggaagaataactgttataaacattctccctctttttattttgctaatgtatgttctctttctccctcctgtctgcttaatggaaacggcagcttttcacagctacccgttcaaaataattataaaatttctgctttatcctttgctttttttggcgtggctttatctgcatctccctcggcagctttgactttgaacgcttccagcttttcctttaaggatacccttgctgcaggtacatccgtatactgcctgccgcctttattctgccccgtatccgtcagtttctccgcaagcgggatattctttgcagaacggtctgcaacctctctatctccctctgacgtttccggctcatcttccatgccgatcccgtcattgcccttttcgtccatgttaagcagggcatttaaggcagacagacggtctaacttttccgctaattcctgctcctgtgaaaaaggcttctgcacttccgcttttgctgtttcaagctgatgctccacgttttcaagtttggtctgcgcttcggcaagctgtttcggcatagattccagagcgtgattgatacgggcaatgttgccgagtgggtctgaaccgatttccaagttatggcttaactgcccttttaagttcatcacaaatttgtggttgaacgaatcaaaagacaccgccattttaaacccggcatattccccgactgttgcaggcacattgactgttttcatttccttgcacatctccacaagtgcagctccggcttcttttttgtccgtataagccttatccccgactttcataaaaaactgctctttatctgccggaagttttgcctttgcggtctgaatgtccgcctgcataccgctgatacgctccttcagaatggcgatctgctgcggatagtgctttgcgatattgtcctccagacggtacttctggctggtgtggttggctttcatcagcttcagctttgacacctgaatatcgagatccatcttttcttttatatagggattgcccgttgccagagcctttacttccgcataggtcagtgcagcctcgtccacgtcctcacagcttctgaccggggatttgctcgtcatgatctgcccgatgaatttctgcttgttttcgatgagctgccacgagtagctgtcaaacgtattctctgtcacataccggtaaatctttacctttggattcatgttgccctgccttaaaatacgcccctcctgctgttcgatgtcggacggacgccacggtacatcgagatgatgtaaggcaataagccgatcctgcacgttggttccggctcccattttctgcgtggaacccaataaaaaacgaacctgcccgcttcttacttttgcgaacagctccgctttccttgtttccgtatttgcattatgtatgaacgctatctcctccggcggtactcctttcccgatcaatttgttttttatgtcatcatatacattaaatgtgccatcccccttcggtgtggaaaggtcacaaaaaattaactgtgtggacttctgctcctttgtctgctcccatatctcaaatgcttttctgacacaggtactcgcttttgagttttcatcatcaggaagcatatcgttgataagccgctggtctaacgctaactttctcccatcgttggtaatcttgagcatgttgtcaaccgctgcgtccactttcctgtcacgcaccgcctccgcacgttccgcaagcgatgccaccatatcctgctggtattcactcggctttaacaccacgttttcatactctgcttccggcacaggcagctttaacatatccggcgtctgaatatctgcactttctttgaatagggaaataagctccggcagattgaagaacttcgcaaaccttgttttcgccctataacctgttccctccggtgcaagctctatggctgtctgtgtttctccaaaggaagatgcccagctgtcaaaatgcccaagccccagcttctgaagcgtgccatactggagatagcgcatattggtgtataattccgtcatgctgttgctgatcggtgtgcctgtcgcaaaagtaactcctttgcctcccgttatctcatcgaggtactggcactttgcaaacatatccgaggacttctgtgcctctgtctgtgcaatgcccgccacattcctcattttagtgtaaaggaacagatttttatagttgtggctctcgtccacgaaaagcctgtcaacgcctaactgctcaaaggtcactacattgtcttttcttgatgtatcattgagtttttcaagccttgtctggagtgcttttcttgatttctccatctgcttgattgtgtaacgctccccattgtccgcttttgccattgcaatcgcagtttcaatttcgtctatctgacgctcgatcattgccgcctgcctttcctgtgacaggggaattttctcgaattgactatgtccgataatgaccgcatcataatctcccgtggcaatcctcgaacagaattttttccggttggcaggctcaaaatcttttttcgtggcggctaaaatattagctcccggataaaggcgcaaaaaatcactcgcccactgctctgtcaggtggttcggcacgacaaacaggctcttttgacataagcctaaccgtttgctctccattgccgccgctgtcatttcaaaggtctttcccgcaccgacacaatgcgccagtaaggtattatccccgtataaaacgtgtgctactgcacttttctgatgtggctttagctcaatgtccggtgtcatgccgggaaatttcaggtgtgaaccgtcatattccctcggtctggtggaattgaacagcttattgtactttgccactaagtcctgccgcctgtccgggtcacgaaaaacccagtccttaaaggcttccctgatggtatcctgcttctgtgcagcaagggtggtttctttcttattgaggactctcttttccttcccgtcctcctctatggtgtcatatacccggctgtctttcagattcagcgaatcctctaaaatctggtaggcgttcctgcggctggttccataggtcatgttcacaagcgcatttccgtaatccgcatttttgccctttacgttccactgccccgtcacgtccgaaaactgtacgcccatgatgttcctgtcaaataagtgctgcggcgtttcaaaggtgtcacgcatgaaatcctccagatactccggctttatccatgttgccccgatgcgcacctcaatctcgcttgcatcaagctcttttggctgtacctgtgtaagtgcctgcacgttgacggcatattccgggtggttctccgcatagacttttgctgtttccagcttgtcacggacattgccgcttaaatactcgtccgcagtttcccatttgtccgttacgggattgttaaagattaccccggtcagttcctcttttatcgtgtcagtgctttttcctgacagctccgccatatagtcaagatcaaccctcgccttttccgacagcgaaaccgcaagggcttcggctgcggtgtcaacgcttgtgacaacctcggcttttttaatggtacgcttggtgaacatatccgctttacccttaaaattgccctcatcgtccagcttttccagcgaacagagcaggcagtagctgctgtcctggttaaacgcccttttgttggtctgtgaattgataagtccgtactttttggagaaagcatcatacagtgaatttaattctgcctgcttctccttaatgacggtatccggatattcctgaagctgcacattgatcagctcctgcgtacaatccctgatgcccaccattcctttaatacgctccagcatggaatctttcatgtccacaggcttcatgacggagttttcacggtaataaaccttatcatccacaagcgtatagctgtaattcttcacgtccgggtctgccggaatggtctggtctgccatctctctgtcaaactcatcaagctccatttcctcaattttcccgtcaatgcggcttaccgcttcccttaactgctctgcaaagggtctggtggtatcgggtgtgcaggtgctttccatgccgtattgcccgcttaccatttccatttttcccacgatcatctccggatgctcagtaaaatagctgttcatggcaatgccgttttcatcttccgacagatgcacccactccggctccaagtccattacccggtcacgcttctttaagaataaaatatcggaagtgacttccgttcctgcgttctccttaaacgctgtattgggaagcctgaccgcacctaaaagctccgccctctgtgcaagatactttctgacctccggacttttcttgtccattgtgcccttgcttgtcacaaaggcaaccacaccgcccggacgcactttatccaaagcctttgcaaagaaataatcgtgtatcagaaagttatttttgtcatactgcctgtctgccaccttatactgaccgaaaggcacgttgccgattgcaatatcaaagaaatcgtttggataatccgttttttcaaagcctgtgattttaatatctgctttgggataaagctgctttgcaatccttccggtaattccgtcaagctccacgccgtaaagcctgctttcctgcatcttctccggcagcataccaaaaaagttgccgatgcccatagaaggctctaatacgttgcccttttcaaatcccatgttttccagtgcttcatagatgctgcggataatcacggggcttgtgtagtgggcatttaaggtgctttcccttgcggaagcatattccgcatcggataaaatcccctttaattcctgatattcattgtgccagttcgctttggtttcatcaaaggcatcggcaagaccgccccagccaacatactgtgataaaatctcttgttcctccggcgtggcggtgcggttctcgctctcgattttttcaagggtgcgtatggcttccacattcctgcggaatttctcttttgcactgccaataccgagggcatcgtccgtgatatggaaattgactgcattttgcctgtcggtctttggctcctgcttttggacattgtgtcctaaagtgtccggttctgacttctggacattctgtccggaagtttccggcacttcatgcgaaacaccagacagctcatcatttttacggttaaaatcttcccatactctccctgatacggcagaaaaataaggagattggttttccataatgtcaaactcaatctctttcagttcttcaaggctttctgcccctgcgattttgttatggagctggtaatataacgcttccctgccaagtatgccttccagcctgctaagctccggctccggcatacgctcccaaatatcatttttttcggtatgaatggtaaaaccttcgccgtcatcatggtattgtaaggtatattgcagtttgtcatgctctccacgaatatcacactcaaaatcatataccgtagtccgggaacctctgttataatcctgactgatcagtacaagattctgtacgtcctccgctgtcaatggcggttctgcattttcataaaagggcgtcttggcagcctccacataactccactcggcagcttccttttccgatacttccttttcaacctgtgcaagatattcctccgcttcttttctgtcagcaaaggtatgtaccgttccgtccccatcgtgataatactcctcacggacatcatcccaaatggcaaaattctcccccggtgcaaaggcgtcgcttgtttctgttacggaaaatctcttgtatggctcaacctcgttttcctttgcagcctgctccgcaaaagcaagcatggcatccgcttctttgtcagcttctccattctccagcttttcacggactgcatcggtgtcaatatcagggaaatcatcactgccctcaaagcgtgaaaatacttccgcttcgtgtcggtcaatgtccctcatggcttcgatgtctatgaaatcatcttctatttcctccctgtccggcttatggtcatattcaaaatgcgtattcccgtttacctctgcatagaagaaatcgctgtcctctgtggaattgcaaagcagataactgtcctcaccggacttccattcatctatttttatacacttctgcccgtcaatggaaatggtttccggttccaaatccttccgcattacagaaggattgacatcatgtccataagtttcctttcctgcctgctcccttttgtattcgccttgtttctgcatagagctgaataccatctcatcatatccgatcacatcaatcagatctgcatgggtatctatatattcctgcgccagcccacgattgataaaaaacctgttatgctccgggtagggtacaagaagcccgtcctccccctgtgtcacaagacggtaacgcactccatccctgccatctgcatattggtgggtataaaaacctatccccggctctgaataatcctctgacgattccagcgcaactgtggttttctccacttcttctacatcaacagcagcaaattctaaggcgtaatcttcgccgctttcctttgccccatccaatgtttccgaaacagtaaccgggcttgcatctgtatggtgggtattatataaggcatacccctccgcttccttgtcaatccatagaaattccccgtcaggcagctttgcgctccactccgtaggctgtccgttttcatcatcaccctcatgtatgatatgccactctaattccccttcagaaatatccaaaacatcattctgctccggttcctgcacctgctctgcttctgcctgtaccgcaatctccttttcatgctcaatatatcttcttgcctgattgataaagccattcagcacagcagggtgtgaagcggcaacaatatcccggctttcatacattgcataaggcgtgatagactttgcccattctttgttttccggggaaatcctgtcctcctgtctgcggtgcatgacagtatttgcaagcacatagctgacacgttctatcccgtattcctttatgacaccctccgctgtttcctttggcagacggtatccgtcaaagttttcagtgattgccctgtctatggcatctttacaggcagcctttgtatcacgctctattttttcctgtgccttttcaagctctttctgcgcctgttcttctttatatgccgcaaatgcttcttttcccttcggggataaatacttatcttcctgaatgagcttacggatacgtttctccaccactttccaggataacagcacctctgaataaggttctgataaatttccttttttcagactgatgcccttggaatcgtgatcctcccaactgtggtcagccccggcaagcgcatgggagctgccgcctattccatactcatgttttaaaaaatcagcagcatctttgctgttatgcccctccataaaataatcatagatacggaatgagccatgatgataaccactccccctgccgagcctgtggtctatctcgtcctgcgtgatgaaatcctcttttttcacttccacccggtcatctgccggaaaagttttctttttcaggagcagattatcaagctcatcccgcagttcctctttgggcatgacagaacggaaacgcagcttcttttcccccatttcaagctggtgcagtgccttatccatgtacgaagctgccatatccacaccctccggtgtcgatagaagctccactaatcctgcatgggaatccggataatttgcagctttcaattccagttcttccggcatttcctccataccgtcacggaaaaagaaatacaagtggtttgcaatgcgcccacgctccgcctcgtctacaaggtagacttcatttgcactcatataagtgccgttctccacctgtgaacgtatctgtgtttccagctccttccagctcatggtaaacctgggattttccaatgccgatgtgccatatccggctgtcattccctgctcatcaaaccataccgctgtctgttttccgtcaaactcaaagccttttccggtggttccgtattcctttttcagaaattccgccatttcctccggcgtcttgccctgacaatacttggcatagatacgtttccgactgttgtccctgccgcccccgcttctaaggattgcgtcaagctgctcctgcggtatcggcattgcaggcggcactttagacacttcctcagcctgcttcatggcgatatttcctacctgctcgctaaacatggtaaagaggtcaagctgtttatacattccgtccatatcaatctgctccgccacttctcccggcagtaaatacacaccgtcctccatataggaattgacaaggaaacgggcatcttcccatgacaaaagcgtttcattttctgccccggcttttcccgtcatgttgatgtaaagcccttcttcaccggcatggaaacctacggaagtaccagccacatccagcgcataatatgtgccgaatggaaagcagttcctaaaatattccgtttgcagccttgtatcctgctccattgcaaaatagcctgcaatctccggtcttttatggatcagaaattcatcagaacataaaatgcctttccgaagcccggtaacatcttcatttggaacagcctgatcgttatccaaaaaagaaccggataatgaattgttttcactatccggctcctgctgttctttattctgttgtgtactgttttctaactgtagatcagctccgtcagcacggtttcctccgctgaatgtctgatgctgttcatcagtcccacccatttcatctgatcggctgctttcagtgcctcgtccactccctctgcttttgccatctgctgtgtcaggaagtccattctctgctctgcctgctcctgtatctgaaggcagtgtgctttcagctcgcccgtcagcaccatgccctgataaatccctttccggtgttcctgcaagaatttctttctcatcagcccgtacttcgtgagtgcctgttccggctcctcgttcggcatcaggttcgggatcagataatccccgttcttctcgtatgtcagtttcattggcaatgccctccgtttctttatggtcagtagtttccgtttcattttgtatctgtgtttcgctttcacgctttaaagcattatagtccgcttctgctgtatttgcaagcggaatttcatctaaattttcggcattttttaaaatagtgccggactgctctaaagccgctttttcttctgcccttttccgggcagtctgacggtcataggctctgattgtattaccgatttccataagaagcggcttgcacatttccgttgtggcactgccaagcacggataaggtctttgtggtattaaattcgctgatattgtcaaaatcaagctcctctttccactgctccatatccgcaccgcagcgtgacagaatggtataggcaatgcttgatgcaagcgtgtcacgcagccggattcccacattcagctcgtcaagctcctctaaaaaactgccctctctgacataaccgatttccggaagcagctcctcataatagtcggacgctatccgctccgcaagctctatcagccttttttcaaagggcatctgtgcgtctgtttctccgtaaatattttcaagccgagcaagcaccacatccttatgttcctccctaagttcccacaggtatggatcacgcccgattctccttgctttatgcacatcggatacatcaaagacatattttaatctcggacgctcgctgtccgtgtcaatcagggcgatcccctttgccccacggtttacccagcagttcattttttcattccatgtttcaagggaagcgcaggcactcgcatcgggtctttgggcatagatgagcatctgctcgttaaaaggatatttatacagccttgcagccgtatcaagatatttcatccattcctgcccgttccttgcgatctgctttgcggtttcctccgccagcatggaaatcatctgatattttgttgtcataggctttcctccaaaaaatgacggcgggactgctcccgccgccctgtttaatcataaaatccgttttcctcaatgcctttttccagaatggaagcaatcagttcatccggttccactccgttgatctcactaatcacaatcagctttgcaagggtatccttctttatgaaaaccgcatactgttcctcatccggacacagctcacgcacgcagatgccgagtgcgtccgcaatcctgcacgctgtcccgatgtccggctcctttatcccggcaaggatatttaaaagggtattttcgtggatgccggacagctccgcaagccccggaatactcatatccatttctttcatcacatttaaaatcttatcccctgtactgtaaactgctgtattcataccgcttatcctccttctcaattttcctgccctgccttattcccaaaggaaaaggctgcattttccttattctttgttacggtaaattttgcttttacctctgccaccttagactccagcaccgagaacatggcttccacctgctccggcgtatactcataagccgacctgtttgcaaggttctctatccttccaatcgcatcaatcgccttattcatgcggtactccccaagacggataaatttatccgctttggtttcctctgcctttgctgcaggtgtgcggtctgcaatttccccgctgtttaaagctgcattttccatagtttcactcatattcaattcctccgtttttcctgaaatttaagggcatacagactgttcccgtatgccctgtatgtactgttattctgtttctatttcttacgcttcggaaattccagcctaaccttatactgtgatcccctgatttccttcccgtctttggtgtaggaatagtcctcaatgccttccgggataagataggcatcataggtgccttttttcccttttaagccttttacaagggtctttttcccctccagcatactcttaatctggctgtcggaaagaacggctcccattgcccttccaacattcatgccacatttattcttacagtaggctccaaacttcccttttaccacatcaccgccgcacttcgggcatttgcctaacgcagttcctgcgttgattccctgtgcgccgcctccgaacatggatttctgctcctcgctgacactgtgataggtctgcacaaggtcacgcaccatatcctcaataccgcccataaattcctgcatggaatattcaccttttgccacaagggtaagggcattttcccaatccgctgtgagcttcggggacttcaccacatcaggaagcacggtaatcagcttcatgccgtcctccgtggggagcatctgttttttctcacgttttacaaaaccgtccttcaccagcttctcgataatgtcggctctggtggcaggcgtgccaagccctttgcgttccacattatcgcccatgtcctctgctccggctctctccattgcagacagcagggaatcctctgatacattttgtcaaggtggttttaagaaattttcccgcaatcgttcataatgagccgcttgattttatcgctcatagtttccttgctggtggtgctgaagtggattttcacccgataggtcgtgtttccgattttcttcacaatatcgggttgctctgcttcctttacggtcagaggggaagcgtttgcgggggtgctggttttattgctcataggctatcctttccatgaaaaaagcccttatgctgcggcgtacaagggcttgtagtcattcttctaaaactctgaaagcgcgaaagtgcaaagcgcaaagggtctgcactttgcattttcagcttgcgggttcgggcggctgcttcttcttgatgaagttgtaccattgaccgccgacgcgcctcgcgcccaatatgccgcccatgttgcgcttggcgttctgcaccgtcctctcggatattccggcttcggctgcggcctttacaatgtcctcgctggcaagctctttcccgtctgcaagcaggtcaagtatcagccgttccgcctgctcggtcttggtggctgtgttgccgcccgcgccggacagcagctcgtcggcggtgatgtcgtattcgcctatccattcaaagcccgtttccgggtcaaggcaaaaggcaacgggcttcccctccggcgcaagggaagatttgtcgtgaatgactacgcgcacattcggctcgcgcttcacgcgcccaatgagtaagacgctccgcgccgccgcccggaagtcgatagaacctaaaccgcgataggctgattgaccgcccgccgctttgttcaaatgcccgataaggataacggcgcacccggtacgctcggcaacttcggcaaggcggcgaaagatagggcgcacttcattggcgcggttcatatccgctttttctcccatgtacgcctgtatggggtcaaggataatcagccgcgccccgttctgcgtgattgccttttctatgcgctcatcggacagggtaagctcccgcttggcttcatcaatcacaagtacgcggtcaaggtctgcggcggcttctatcaagcgtggcttgacggtatcgcccagcccgtcctcggcggtctggtaaatcacttggaatggcggcaagggcttcattcccggcagcgttccccctgtggtgcaggcggcggcaaggcgtagggcaaaggtggtctttccctcgccggggttgccctgtactatggttactttcccaaaggggatatacggcttccatagccattcaacggtctgtgtatcaacctcgctcatgcggataatctcaacggtttcctcctgcggcggctctttcacgccgtaaatcgcttcccggatatacttcccgtccgcgatttctgcccggtgctgcaatacctcgttccagtccttgtaaagcggcacaaggcggtgaacggtcaagccctccggcataagctccacaaggcggctgcaagcgtcgtttccggcttggtcgctgtcaaggcagaggtaaacggtcttgatgttcggacggtcagagaggaaacgcagcagggctttttcccccacgccgcccaacgccagatagctttgcttctgccagtcctttttgaacagacagaggaaagataacaggtctatcggggcttcaaagacaaacaacctttcgccctcgccacggtagcagaagttaaaggatttgtcgctgcctttcacatcaagccgaaaactcccggctgtgccgcgctgatgggcgtatcgcggtatgccgctttcatctctgccgacgaatacggcgttatggtgggcggcttcctcgtaaatgtcgccattggaaagaaaaaagcccgtcacatcttcatcaatgcggcgggctgctgtgaggtagttcctcgctatgcggttgtcggtgctgcggggtggcagtcggaagtcggataggggcgcggggcaatgtctgtccggcggcggggcggctcctttttcgcctgtcagcagttcaacggcttcggtgaagctcttgccgaaaaactccatgacaaaatcaacggggccgccgcccttgctctggctgtgcctgtaccatttgtttccccggacggtcaagctgtcgtgccgtttccaacggtattcattcccggcgcgggtaagctgctcgccctgtgattgcaggaaagaaacaaggtcggcttggttggcgcggtctatctgctcttgggtgtaatacatggttaatacctctctttctgtggttgaattgttcatagttttgaagtaaaataaagtcaacaaacttgaatttgacaaaggagtgtgattgtatgaaaaggcaactgcaaggtatagcattgattttagttagtatcctgctgatgttaggatatggcaatgtggctttttttgatttaagtttcaaatgggctttaatcttttcagttatcggcattactggcgttataatgacatttttacccgataagaagtgaacacattcctttgtcggatgggaatagaggacggacaggcaaatcagcttgcccgtcctttcctttatcgctcctgttcatgccgcttggcgcggttctgtgtctgttccggctggtcggcgcggagtgcaatatccacgcatttgcggattttttgaagctcggcaacctcggcgcgggtatctttcagtttggtataatcgctgtccctctgcgttttgaggtcagcatattcctgttcccattccgcaataggcaaggtctttgttcctttcggcagatttgcatggagatagcggtttgccgcgtcccatagggtaagctcggcgcggcgggcttccgcaaacttctcctgttttcctttccagcggatttgccgatactcgtcctgtatgggcttgtaggtctgataatttctgccttgctccatgagtttttgcagttctttcatgcgctgctcggcggttttcattccctcccggattgaataggctctatcactgacagaggaaagggaagcgtcaagctcatcaagattagagataccatgctcggaaagatagttgaccgccgccgctatggttttcaattcatcggctgcgtgttggtgctgccaactttgcgaatacttccggctcttttctctctgaacgctcaaatacttcatcagcagatttgcaaggttgggagattgcggcggcggctccggggcggtttcccgcgctttgaacaggtcggcaatccattctttgagcttcccaatctgcgcccggatttcccggataaggcggcttgtcttttgaatactgcggttcagttcgcctttctcggtggctacacctttcttctccatctggcaagccgccacgcccatgtggacggtgggcagctcgtcaattcctctctcggcgttgctgcggtggtcgatacgctccgggcttccgttcctctccaaaaagtcgttggtatagtcagcccatgccttgcgccacaagagggtgttgtccttgtcattccagcctgtaaggtcaattttgtgcgtcttgtatctgccgcttggcaagcggatacgctcgccgttttcgtcaaggtcatattcctttttggatttcgctgtccatgtgccgcgctcgtcaagtggtcgcatagtcagcatgatatgacaatgggggttgcccttgtcggtgtcgtgaatggcaaaatccacacacattcctctggaaacaaattgagaggaacagtattcccggacaagccggatctgttcctctctggataattctatggggagcgctgcgtcaatctcacgcgcaagctgggcgttcccggctttctcataaagctccacgctgttccacaaggttgaacggtcagagaatgagggtggcgcgtggggcggcagcatgatttctgtatggacaacgccgcctttgcgggtgtagtcatgggtcattccgtcccattcgtttgtcagcttttcgccgcttcggtaggcggctgcggcaacggctgatttgccttttcctcggctcacaatgccgatgttccaatggtaaatggctatgggtatcacctcccggataggataataaaacccgcaaaaatggtacagacgccaacggcgggtgtactgtttttgtgggtgtgcagggatagccgcgaagcggcgcaaggggtgcagccccttgttgcggcaaagccgccatatcggagcgcggggtaaaacccctgtgcggagataagccctcggcagagcgcacacgcccgcaagggtgtataagtgcgcccttagttcctaagggattttcagcttgtcgctccctcggctcgttttttcagatattcccgcgctggttcactcgtcaaggcaagccggagaagtgctgtggcttcctcgtcggtcatgttctttgcttccggcacaatgctttcaaagactgcgccccggacgataaggcgatggctgcgcgttctgcgttcctctttggataacttctgacgcaacattttttcccggttctcaaactgccgaattttcttctttccgtcctcaatctcggcttgcaactcctcgcgggttttctctcttggctttgtcatggttgggcgctcctttctgctcataatcatagaaaaaggacagtcgattttctcggctgcccttgtaaaatagaaaacttatttactttgcaagaaggttttgttcggatactttttcatcagaagtatggcttgtttgggcgtggggcatatcagtctgagtttccgtcaaagtctgtgttatgatagtgttcatataaccagtattttccctcaaactcaacgacaatgttatcgccgtactgataaaccgcagcccctacaatatcatcatttgcttggaaattttcttttggttcttccgaagaactaactgtgttttcgatttttcctaacaaattgaaagaacttttttcatctgcgaagttgggttgagagtcaacgatttgataaagcgtatcatttacatagaccataggagcaatatctccagaaatgggaaccaatgcctttagcaaatcttctcctgttacacctaattgtgcttcatcgcttgcaaaaggaatacgcagcaggtattgttggtctacttcgtaaagatatatataaatgcctgagccaacatcttgtgtgtcacctaaaagagaaagaacatcttctcttgtcatggtcggtgttagttctttaatttgctcagatgttacctgcgtcggtgtatcgagcggttctttgttttctggtattagactaaggatttcttcagtcaacgggttactttctcctgcgtcaatcgtttttgcagcttcttttatttctttatgagaatagtcgctcaaatcttcaacagcaatgccgagagaattgagataatcaaccgctgcattatattgaattatatcaacggcaaatgcggtcaatggtatcatcaagcacaagcaagctgcaatagccccccactttacccaaatgggctttttggctttcttcttgtagttgagagcttcatcgacatattttgtgtcaagctcgctcatagcgtcggaaaacttctttgcattcatacgaatacctctctttcaatcaaatattgcttcatcttctcgcggatacgggtcagccggacagaaatgtttttttctgaaagccccataaactcggctatgtccttatagctgtcggaaaaccaatagcggcgcatgaaaataacgcggttttcggtagtcagcgtgtctaaaaatgcttcaatgatacgggctaactctttggcttcgatttctgcttctactgtattcggggctgctatacaggcttcaatttcttccaaagcaatcgtgtaatggctgctccgtttggctgcttcctttctccaatagattttgagtgaaatgttccgaacgattttaacaagataagatagcagcgggttaggtcgtgccgggggaatggcgttccatgcgcctaaataagcgtcgtttacacattcctccgcgtcttgtctgctgcctacgatatggtaggaaagattgtggcagacctttccgtattttatatccagctctcgtatgccttgttctgaacgtccaaaaaacatttctatgattttttcgtcgtctatcatctcaccgcttcctttcgggcttcacctatgtactacggtttcagcggcaaatactacatctaatccgaaactttttcaaaaaaattatagcacatctttttgaatagggtgtgtcaagttgccggaatgtttctttgccgctttgctggcggcgttcctccgttcctcactgtatggggcggtcagacggaaagagaaccgcccctttgcaatatcaaactccatgcagcctgtttcggggtctgcgtcggtctggcggcactggtcggggtactgtccggcgtagacggcaagccgcttctttaagtcggtgttgtgtgtgcggatatggatcagcgggtctttctcgtcaaaccaaatatcggtggtcttttcctgcttcgtaagccctgttctcataaactctcctttctgcgcccctgttacgcaataggggcatttttcgggtgtttttcccggctcttgacttggggaaaataaggattttcaaatagaaaccgcccggacagggaatggttcgtcggggcggctgttatcgcaagatttctgttttttccggctcttgaccgtcaaacataaattagctcatgctatgtgttctcctttctgctcggcggcagggggcagctgcttggcttgctcttgttcctgctgcgctttccattgtctgcgtttcttttccatatagcgtcgattgtattctgctttttttgctcggcggcgttcctgttccgctaacgcggccttttcttcctcggtcagtttcacttccttgtgagggatgtccaccttaccaacaaaattaaagaaaatttcaatttcctgcgttctgcttgctcctttgccctgggcttggtggacgaggattttttctacaaactcatttatcatggcaggggtcaactcggaaaagtctgtatattttctgacaagggaaagaaacttttcggcgttgatggtttccctgcttatgcgttcaagttcctgttggtcttgggaaatgatttctgtcaaatcgcttaactcggcctcaaaatcgctgagcatttgttcaaaaatggtatcggaaagtcggccacttacattgtcctcatagagctttcggattaggcgggtcagttcatcggtacgcttctcgttgcgctgcttccgctggcgaatggctcttgcagctttttcctgcctggcctcggaagcggagcagacctgtgccataaactcggcttcactgctcaacgcatagtcacaaacgcccttgatggcttccaacaaaagctcgttcacaacagcagtacgaataaggtgcgtcgtgcagtatttatcataatgctggttgcccaaatcataacgggaacagttgtactcgtcacgatccgggcgctttttcccgttgggtctgcccgcccagtcacgcgcgtttccggccttgcccctgtggttatacatctttgcaccgcaatccgcgcaaaacatcaagccggttagtggattggcctttcctatgctgtctgtccggcgaatggttttccgtagagtttgtacgcgttcccatgtttccttgtcgatgatagcttcttgtgtgttctcaaaaatgactaaatcctctttgggagtcattttgacgcgcttatctttatagctctccttataagtccgaaagtttaccgtatgccccatatattcctgcttggagagtatgtcggcaactgtaccgccgcgccatgtgtaggggtctgcggcattgtagtttgattgatggtttcccataccgcgttgtgcaagatagtaagaggggcgctcaaccttttccgttgccaatatgcgggcaatttcatacgggccttttccctcgatggccatgcgataaatccggcgtactacttcggcagcttcctcgtcgataatccaatggtctttgttgttggggtctttcctgtaaccgtagatacaatggttgcttgtgtgcttgccggacatacctcttgcccgtaaaacagtggttatcttacgactgcaatcacgaatataccattcgttcataatgttcaaaaagggtgcaaactcgctgctttcccgtttgtcgctatctactccgttggtaatggcaataaaccgcacacctttctctctgaacatcacttcggtgtaaaagcccacctgtaaataatctctaccgacgcggctcaaatctttaacaaggacagcagcgatttcgcctttttcaatgccctcaatcatgcgcttccagcttgggcggtcaaaacttccaccagaccaaccatcatctgtgaagtggacgcaattcgtaaaaccgttggctttcgcatagtcctccagcattttcttttgattgataatgctgttactatcacctgtgaggtcatcgtcacggctcaatctctcataaagggcggtgattttaccgttgcctaatttcttaggtttcatgggaacgctcctttctatgggtgatttcttatccccctttcacagcatatatcttccgtgtaatgcttcggcggtgtcgtgtaatgctcgctgatcttcgtctgcatgttctcaaaggtctgtccctctgtaagctccggcagcttcttttcttcggtgctttctttttcctctatggtcttaaaggcacgcttgaaagcatcctcaaaatctttccagccgttatgcgtgaccgatttaccggaagcatgaaaagtatgaccgccgcaggaaagctctgcctttaccgtttcatacagatgtttttcccccgtagcacacagtaacctgttggccacaagggataaaatctttcgctccggttccggcagcgtggaaaggtcagcctttgcaatctccattgtgggaatgatcgcatggtggtctgtgacctttttgctgttcagcacacgcttgatgttcggattgaacatcacatcttcctgaaaaagaatggaaccaaaaattgcttcgatcacgctctttgcagtctgctccatatcatcagataaatactggctgtccgttcttggataggtggctaactttttctcataaaggctctgcacatactctaaggtctgctttgcggtaaaaccaaacaagcggttagcgtccctctgaagcgtggtaaggtcatagagcttcggaggggcaatgcttttctgctccttagctgcggaagttacaactgcctgtccgtttttgcacgccccggcaacagtttccgcttccgccctgctgttaatccttcccgtggctgcgtcaacaccgccgcagaggatatgtgccatgaaatactgttctttcctgaaattcatgatctgtgtttccctctcaaccagcatgccaagggtgggcgtctgcaccctgcccacctttaacaccttgccgccatacagcaccgtaaaaagccgtgttccgttcagtcccacaagccagtctgcccgctgcctgcaaagggctgactgatacagacagtcataatcgctgcccggctttagatttgcaaagccgtcacggattgcgctttcctccattgaggaaatccacagccgcttcatgggcttattgcagcctgccatctcatagaccagacggaagataagttctccctcacgccctgcatcggtggcacacaccacgctgtccactcttgtatcgtgcatcagctcccttaacaccttatactgtgcggcagtatcccgtttgacttcatgctgccagttctccggtatcatgggaaggctctcatacgtccactttttccacgcatcagaataggcatccggctgtgctaattccaccagatgccccacgcaccacgaaacgatagagccgcttccctccatgtatccgtcttttctctcctctgccccgatgacactggcaatctgctgtgccacgctgggcttctctgctatcactaactgcataatctgtttcctcctttaaattcaatgtctgaatccacttcatttccccacacgtcaaagccttccgcttttctgcgggcaaacagctcaatctttggtacatcgcccatgagcctcctgatgcgctcatggacttctcccggtttgcggctgtgttcctcgatatgggaaaccacaacctgatgcactcccgcatccacccgtttcgggcttccctttgtggcaaggatacaaagctccacattgctgcgtgtccagtaccccatgccccagaacagggaatcgctctttttattctgctttacccacacaaacgctactgttttataggtaaagccccatgcccttatgacttcaaagccttccaaaaggcaggggaatgtcacccaaagaaataaggcacagtccttttctgctatgtcagctacgggaagtgccttaatgtcctcaatattcatggtgggatagtggctttctgcactgcgtcccaatccttttttggaataaaccttgtactgccacggcgggtctgccagtatcactgaatatttcttcataattcctacagctccgcctccttagatttacttttactctgcgtcttttgggcgggcttctgcgtgacagcttccgctttcttttctgcaagcctgccctttaccgactccctcggacgctccttataagcctccaccattttctttaaatcggcattggcaatgctgtttttctctgtcccccattcctttttgccgtcaggcttttctccgaccacaaccggacggcgcagcgttgtatgcccctccgccgggagcttgatccacatccctttaccaaacttatcctcgtggacatggtttgcctttaccacaaaagtctgccacggtctgtgatcattcttatcgggattgggaacgagtatttccttgtacttattcccgtccttcccctgaaattcctccccgacacagcccttgccgaatttcatcgtgatctccttaaattccttcttggggcttgtttctctgttctcctgccctgctttttccgatgccgcagcccgctttgcggcaatgtcatcaagcacgttgtccaccgtttctttcattcctgtttcttttcccattcaatgctcctcctgcttttccttattccgtggtatccgccgcatcgctttccctgtcatcgtcaaagaaatcatcatcggagctgtcctcctgctcctcatcttcattctcatattcttccgtatcttcctcgtcctcatcttcgtcctcgatgaaatcctctttcttcctgcggactaccttaaaataataagctccgccgataaaggcaatggcaaggatacctatgatgatataagaagcaatagggctggcttcctctccggcttcttcctccggttccgtttcctccgtgctttcttcttcggtactctctgactccgtatcttcctccggctcgctctccttatcggtattgttgtttggcagtgcgctctccgttgtcgggattgcagattccagagcagcggagtttttcggtaaggtttcgctgttgtcggaagtggtgttcagaaggtcattttccgtaatctccgtcaggaaataaaccatttcctcctccccgtccctgtcaataatcagataaaatactttatccgatgcggtctgaatagtgtaaaactccttgccctgttcagactgttccttatcaccgctttctgccgcttccgcagcatctgcttcagcaaaagcctgtttcttctgttcctccggtgtctgtgaaatggtattgccgtcactgtccgtctttgtatgctctgtcaccgttcccgtggcactccccggcttggtggcttcggcgttgaccgggagctgctctgccggattctcatcactctcatcggcagggtctttgtaatacggatttttcgtcttataaacttccgacatatttccggcattgtccattgcggaaatggtaaaatactcgtatcctgcatcaaactgctgtaagcggatattcagggttccgtttgtcaggtctgtaaactcataaccgttgacatacaccgcctttgcgccggaatccgtatcatgcacctgaatacttaacagtccgtcactgaccgccgcattgagggtgggcttcgtggtgtcaaaacatttcattgcccggtttctctcatatgtattgcctttctggtctgtgacctgcacatagacggtacagttttcagaaatttccagcttcttatcttccgtcacgtccgtccagctcccgttctgccctacttttgcctgtatcatggcaatttcaaagttgcccgtgtgtgccgtatcggatacggtaaacgtaactgttgccctttcgttgtaccacccgcccggactgttgatgttaatgactacattcggagtcttgtattcacagtccctgtaatctgcggcgcatacttcacaatccttgtcatagtcatatgcgctgcactttttctcacaggtacacaccggctctgttacttcatttccggaaaccgtaccgttttccgtactttcctctgttgtattctccgtgctttcttccgtgccgccctctgcactctgctctgtgtcggcttccgtctgccctgtgctttccgcaggttcctctgatactgcttcctgctctttggaatcctccgcatggacattcactgcataattcccgttcagggcaaagcccactgcgggcatacagaataatactgctgataaaccaagcgataacaccgctttagttgataacttaatttttttcatggcttactgcctccctttctgtttgtcttgtctgttcctcctgctccttctgctttaacagatgcaggatttcttcctcactgactttattcagcagaatcagcctgtccaaagagattttattcttctcaatgaatttcatcttttctgcgtcctctgccatctgaagctgctcctccaagtccttctgcctttcctgcagcgttgcaagctgctgccggactttctgaagctccttttcaatcctttcctttgtcacatcatttctcctttccatgccccgttaaagggcatttatttctaattcaatctgccaaacgcataaaaatggctctgccagtacgaggtattgatattggaatacttaatcggatcgcctgcatgtatcatcacaccgtttccgcagtaaattcccacatggctgactgcaccgcctgaattgtatgtacccgtaaaaaagataatatctcctgcctttgcgtccgctgccggaaccggagtacactggtcataaatgccctgtgccgtggttcttggaaaattgtgtacgccgctgttggtaaatacccagcagacaaagccggagcagtcaaagctcgttgacggtgacgaaccgccccatacatacggatagcctagatattttgctgcttcctccataagtgcctgtacggtttcatcattataagaatcaggcggtatggcacctcccccgccgcttccgcttcccggtgtttccccgtacagcgttttttctcctgcttcaaagtaaaataacgggttataatattccccgttatacagacattcgatatgaaggtggcttccggtgctgctccccgtgtttcccgttgttccgattaccgttccgtgtgtaatgtcctgtccggtactgacgcttaacgtgtccatgtgggcatatttcgtacagtatcctttgctgtcctcaattaccacatagttgccgtagtaatcatcgtaagcggctgttgtgacggtgccgtccatcgccgcatagaccgtggttcctgtcggcactgcaatgtcaacgcccctgtgaagctgctcctgccccgtgaccggattgatgcgccagccgtaatagctcgatacatagttgtaccagtaaaggtcaagcggtgtgtaaaactgctgtaccagcccgtgtgtttcgttataaaaagcataaatctctttctgctcctcattcatgtgtccggctgccaccacacccaaatcctttgcggtaagcgtgacctctaaaatactgacttcgtactcatattcctcctctgtttcctcccccgtttccgggtctgtgaccgttcttgtgcctgtccttgtttccgtggtcggattcagggtcagctcatacatctcgtcaaaaaggctttctatttcaccctgcacctctgccgccgtaaattccgtatagactgcggataaatagctgattaaggcaaagggatcatgccctatggcatccagattgtagcggtattcgtcataatccggataatctgtttctatggcatcaatttctgcctgcaggttcttttccagctcggaaaatgccaaatctgccgcatccatctccgccgggacgctcatatagctccctgccagcgtggtactcatgccgtccgaaaacatcgccccgcaggacgatatggaggtcataatcataatcaaaagcaccgcaaaggctcctatcgtcacaagcagggcagcgtgtttctgtgcggcttcctgtaacttctttgcaaccgttgtggtaaagttggcagattttaccgccgcttcttttgtgttcttcgccgcctgccctgcccgccttgcctttgcatactcacgtttgatgcgctgtttctgcagtcttttctgcagctgcttctttaacgtcttttcctgcatttccgggttttcttccaaaaacttccggtaacggaaattgacctctttttgaaactgctttttctccagcttcgccactttctcacgccgcctttgcagcctgtttttatggtgccgcttcacaaagcggtacgcatcttcggctttctgctcacttttgtgtgcgccctccacgcctgcgttttccttttccacttcggcaaccttgccatgtgcataattggtaaactctgatccggctctgcccgccatcctctttaccgggctgtccggtttaaagggcttttccttttttacggcggtcagcacatactttgccctgcctgtcttttcatcaaagacacgctcaagggaatactccgttttctttggcagcttccgtcttgccgcttctgtctttcttccggctttctccgctttcttctgtaacttatccagctttttgctgccctgaaactccgttttttctccctctgtaaaggcattgtcttttgtattgaaatcctgttcaaaatcagaggttttcgtccgttccctgtccgtatgctcacgctgtttccgcctgcggtaatgcccccttttctctgcctgatgataggtgtccctgcggcggtaatcatcgccggactgcctttcttcctgcgctgtgccattgtcctccgtaaaggtactgttttcctttgtaaaatcacttttcttctgacttccggcatccgcattttcagacattttgtcactctgcccaaaagcaccctgcttccggtgctgctttctctgcccgccttttgccttcctgctgtcagatgtttttgtctgcttttggacatcctgtccaaaagtttccgcctgtcccgacctttggacattctgtccggaagtgtcgtctgcatctctcggctggtgtacgccggactgcttctgctgtgcctttttcggtgcggcagttccctttacggagctgcccccggcaaaagcattgctatcctctgcaaacccagccgcctgtgctttctttatctctgccattaaaattcctccatgtctatctgctatccaatgcctgcccctttctgtaccgcctgtgtcatgattcttaaaatcctttacggaatgaaacagcctcttatcgtttactcatgtcaatcagccttattttcatatccgcctcctatccgttctcctgcaaggacgcagtattcctcattcagttcaatcccgatataatgcctgtcgtttcttactgccacaagccctgttgtgccgcttccaaaaaacgggtcaagtacaatgccgccctttggacagcctgcaaggatgcacctctccaccagcttcgggggatacgctgcaaaatgatttccccggtaaggcactgtgttgatcagccacacatcccggcagttcctgacaggagaaatgtcgcttttcttaatttcccccgctttccgtggcttgttgagcttctgtattcctgcctgccccggcacttcgccggaatatttatggctgcttccacgtcctcccatgtaccgccttgccgtatccgccgctatcggctccgaaatcgccagcgcatcaaaataatatttctgtgacttggcaagcaggaaaatatgctcatagctgcgtgtcagcctgtcctttgcactttccggcatggcgttccctttctgccagacaatatcatttctgagataccacccgctgttcctgagtgcaaatgccagcatccacgggatgccgattaaatctttatgtttgcacccttccacattccggactatggaaacattctgaccgttcctgccttccgggttcttcgggtctttatagccccctttgctccccgtaccgcagtatgtgtcggaaatattcagccagcaggttccgtccgccctgagtacacggtaaacttccgaaaaaatttccgtcagtttccttatatactgttccggcgttgcttccctgccgacctgcccgtccatgccgtaatcacgcagcccgtaataaggcggcgatgtgacacagcagtggacgctttcagagggcatatcttttaaggcgtcaagacagtcattatggataattgtgtctgtttccatcactttcctcctccgttcatacattattttcctcctgctttacgctttcctccggcttggtattcatgatcgcataggtcttggtgtccttcgggtacttatccacaaacgggattaccacgttgtcaaacaaaatcagtccgcttcccggctcagagtttgtcacatgggcaagctgcttttcggaaagccccagcttgtctgcaagtatcgcctgatcctttgcgttctgattcagtaaataaacaaaatcagagttgccgagtatgccctcgatttcctctgatttcaaaaaatcgcccacgttctgcgtcaagcctgtcggaatgccgccccacttacgaaaccgcttccagatttccacgctgtaaatggctgtctgcttttcctttaagagaagatggaactcatcacagtaatagcgggtggcaatcctgcgctcccggttctgtgaaaccctgttccagaccgcatcctgcacgattaacattccaagctcctttagctggttgcccaagtccctgatgtcaaagcacatgatgcggttatggctgtccacgttggtgcggtggttaaaataattctgcgatccatgcacatacagcacgaggctgtttgcgatacgctccgcttttttgttcttgtgcttcaagagggcattatacaaatcttcaaggatcggcatattttccggcacgggattttcaaagtagccatcgtagatatgacggatacactcgtcaatgatgcctttctcatcgttctccagcccgtccttccctccggcgatcaggtcacataaggtaatgataaagtccgatttcagctttaacgcttccttgtcccccttatgggaaagctgtatatccatcgggtttaaataatcctttgaattggtggcaagctttaccacctgcccgtgcagtgcgcccacgagggcaaaatattctccctccggatcacagataatcacatcgtcccttgtcataagaaaacaggataaaatctcacgctttgcactgaaagacttaccggagccgggcgtaccgagtatcacgccgtttggtgttcttaagcgtttccggtctgccatgatcatgttgttactgagggcgttcagaccgtaataaatcgccggagcaggcatgaataactcctgcgtacagaacggaacaaggatagcggtactctttgtggtaagcacacgctctatcccggtttcattgcagcctatcggtgcggaagccataagcccctgctcctgcagatactgtaaacagcgcaggttgcagtttgcctgctggataatgccggacaccctctgcgtgatgttctcaagctcccgcttgctcctgccgtagcaggtaatcaggaatgtcatcttgatgatcttctggttgctggtattaaggtcatccaaaagctccagcgtgtccttttcataagtgatgatgtccgtgggtaaaatatccatgtcatagccggagcgtactgctttcttctgttcctcaatcttcatcttctgaatatttgtcaatgccccttttaacatcttgatcgcctttaccgggtcaaaggtctgcatgtgcatggtaatggttaggttatcatcaatgtcaaggagcttctttagcagctcatcattaaatctcggtgcaatgatgtccagatagtggacgctgccatacatcttccccgctttaaaacggctcggataacggaagtcaaagcccggcggtgcgatatagtcctttacgcttttaccggattctgacagctccttaaaggaaaaacggaaaggctccattgtatcctggttgaaatattcatgcaggatacgcagccgttcctttccgtcaaggcttctggcgtgtgtgccaagatttaaaaagttctttatcacatcggcttcgatgcttgcaagtttcgcccttgcttccttgaagcctttgcactcaataccgaaaatcaggtatttcgatttgatgatgccgttgtttccctttgctgcctgtttctttaacatttccgtatattcctcacggatatcgtcaaattcatctccctgcaaaggaatgtcaaactgctctatcaaagtctgttcgttgacctgtctgttaaacaggaacagttcaaacttaatagacggatcaaagtaattgatgagcttgctgtactcctctaaaatctccccctgatcttctatctctaaaaggtcatagttgatgtcaaaaaactccaccattttcgtgtagaaagtggaagtcacctgacagataccgtcctgaaacatctttttaaaggtaatggtattctgtgccgtggttggcttttcctgttttttgctgtttccggagagagtacgtttcagctccataagccttttcctttctgaaaagctcaatcctgctttgggctttgcagctctaacctgcctgccctgcgtttctgcctgcggctttttcttcaagatagcgcacctcctttttcattctctctttctcctccaactgtctgtaaagattttctgatttatagggacggattcccggcgtgaggattttctgccgtaacataaaatacagaatcttctctgcggggaacccgtctttttcatacattgccaaaaagaaaaacggcagcatgagggctaccatgatcagtgccgatgcctgtgtgccgataaccccttttgtgaaaatataaaaggggatgcccaccgcacccgcacttccaaagcagacaagctggcgttttgttaagttcattgccacctttgtcttgatgccgcttagattttttggcactgctactgatatagccataagcattgcagccggaaaccatctcccggctgcacctcctttcccgtatgcaatgcccctttaatgggcattgaagattgatttgctaagggagcctgtcttaaataagctgaagcataggattacggtgtaggctgccaccgaccataaagccgagtgaagattgccggcaactgccacgccggataccagcacggagtaaatacctacgcacaccataatgaaaaatccctgaaatgccaaagcacacagtcccttgatatagttgcttccgatactgccccattcccggttgctcaaagtcgcaaacggaaccggagccactgaaacataaagtagggtaagaacccggcgccttaccatatcactatggcaggtttccgagaactcccctccgaaccggacttacacctctcagcgtatccggctctccagatgtcagtctaatttccccgcgtgtaacttgtcgtgacagtagacgcagagtgccattgtcttgcgcttacgcccaatcatggcgatttcccattgttttctgccacttaaatctttgagttttcgtatatggtgtatttcaagcggcacattctctgcgccacaccactcacacctgtttgcttgcagtctttttataagactattacgcccataattctcaaaaattcttgctactatatcaggatttccgctttctactttagtgtcccggcggaacccattattgtaaaacaatacctttccgaccttgccgtttttcttcggatattccacaacaaaatcttttccttgacggtacttgcggataattctgctgattcgtgtccgatattttccagcaaaggttttgagcatactgtatctcattacatagtagaagttattgagtacagacacgttgtttgcaagtcggtagtagttatacaatccacggatttctgcgttgtattggtttaggatttccaaatcgtccaagtgcaacaggcgagtgcgccggacaggttcccaaacctctttgtttccattttgtttgtcgtatttaatcttgagggcattgtaggagaacagtcgttttacccacttatcatggggaacataaagtaagacttttccattgtttacccgtctggtagccccggttttggtctttttgttgtgttcgcctttggcgattgtgacctcatatcccaagaacttcgcagcgtcgtgtccatgagtaatcaatgtcttttcctcggacatttccagatggagtttgtcccggataaagcagcctacatcttgtttgatctgttctgcgtcctctttgctgccgataactccaattaagaaatcatcggcatatcggatatagcaaatccgtttatagctatcgtccatctggtcgctatacggcatagatttcagactacgccgcagttcccggatttctgcaattaagccctctttttcttcctcgctcattttagagagatttcttttaagcctttgttctttcccccggcagacatccagcttcttcttgaacgcaggattgattttacggcggtttccgcagttgaatttctctgcatactctgccatatagctatccagttcgttcatgtagatgtttgcaaggatagggctgatgatggagccttgcggagtgccggaataagtattgtgataattccaatcctccatatatccagctttcaagaacttccagagcagaccgatgaaatgttcatctgcaatccgctttcgcaaaatagcaatcaacacatgatggtctacgttgtcaaaacagccctttatatctccctcaacgaaccactttgtccccgtaaaatatttctgcacatatttgagtgccgtatgacagcttctgtttatacggaaaccgtgggaatagtcgctaaaggttggctcaaaaatactctctaagatgagccgcaccacctcctgtatcagtttatcgtcgaatgacggtatccccagaggacgcattttcccattggatttcgggatatacgttctccttgccgggttaggctgataactaaaatcccgcatcttttcaatgagggcgtttatccttgccattcccattccgtcaatggttttgccgtctgttccggctgtcatgttgcctggtttcgcctgtatccgctgatatgccagcagatagaattgtggattgtacaggttgcggtataaccgctcgtacttgtagctcttgttacacgccttggattttaggctttccaacacattttcaggacttctcataatgcctcacgcacctttcctttttatgaattggttgacatcctgcctcccttcgccatgtagacggctttcccgccctcggactactacggaggctccgttgccatgccggatattcagcgtcatctttcttgggtttttaccccttgaaatttatcgccttgcggcattacgcatagccggatagttccggcgttccggtttaggcaatctccagttagacactttgggaaaagcgtattgtgatgtcggtagtgggttttcgtccttttccgcttactgcggctggctgtcataaatatcgtgcggtctgtgtttacctgtcacattccgctatgacatacggcgaatacaaccatcctgcgccgccgggtcgagtatcccgcctcggactgcccttaaagcagtttagccttgctcctcattcacaatgttgcgtcttgccgctcagtcgtgggtagatggttttcccaacttgcgatttttccgatacgctattgtcccccttgtggtttccctccggggtaaatcggatgacgctaaagtgacgcttttcacgtctttgatacttttctttaccggcttgctaaagccgggttcccaaaatgcccgcacaccgcctttggatgaaaagcggcgcttctggacgcgcggtatatttctatcatgcgcccatataaaatgacggtgattaagacggacatgattttcatacataagctgacgatcatggtttctatcccaagccctatcagttcgccaatgcccatagtggaaagctgggtgttgaacatggtctgtaaagtggctgtcacatctatgcttgcattgcccgtgatgacacccgcagcctttgtcacgatatggtttcccacatcaaaaatcgccatcgtgatgtcaaaggtatagctgacaaacagcactgcaatacatgcctttacaagataacggaagaaaaattcgctcccgatctcgtgcatgttgttcttgtccattaccattgtaatcagctcatagcagagaatggcactgatgatcattcccgctatgggaaccatgacgttttctgaaaggctctgtatcatggaaaagataccggagttccaagagctgggtgttttccccacctccccggcgatagtcccgaccttatcatttacgtccgtgaacatcgtggaaagattgtcaagcacccagccctgcagcatttcctttataaattcagtgattttgtcaatgatcgctcccatgaattatgagaaaagggaagtgagctgtggaatcaccgtctgcgccacaatgacaatgccgccgcccgccatgagctgcttgatgccctgtgattttgcacccggattgtcatttccatagccttccagaaggttgataacgccccatactgccacgcctgctccgattgctgttacgactgtctttaatcctgttactgctgttgtaaaaaaactcatgatttttacctctttctttcctaagatttgattttttgataaagaaagagctttgtatgtaaatccccgccctttgtggtaaaataagggcagggaaatcctttggagaaccctgctggcatccggtacattctgtttggcgataggctgtgccgggtgcttttctattctcacaaagatacattgcaaaactcctttgatttgtgtttatccatgccagctcgattatgcttcgcttcatctcgctgcggctgaacgccaaatacagctaaatgcaaatctgcgtgtctgcaagtaaacttgcacacttgctttgcattacctgtgcatgtctaaacagattttcatattcagttgtcaatctgcacttttggacactctgtccaaaagccgctattcagttgtcattgaggaattatcctcctgcccgtttacttccccacagtcaaaggcatcgtctaccattgttgcaggcgtgactttcatgtgatgcagatgcttcacatagtcctcaatgtcaaaggcatttttcgggtcataatcggacagctctttgtatctgtcatgcttcgttatatcaaacttgtctgagaaaaaaggtcttacgcccctaagctgcatgatacatttcccgccgtccatgaccgctatctcatcctgactcatcagctcttttccggtcttttggtaattcagaccgtaggactggcttgtacctctcgtatctgaggtattgtaaaggtctattgtttctttacccaaaatctccgccatctcttttaaggtggtcttttccttccctccgaggaataaggtggtatcacaattcccttcaatggtgtcagcgttgtccttataaatcgccttgagctgggactttgactgcaaaataatagaagctgatatttcccggctacgaatggtagcgatcagcttctcaaactgtggaatctgcccaatattactgaactcatccagcaggcaccgcacatgaaccggaagcctgccattataaacatcgtctgccttatcgcagagcaggttaaagagctgtgaatacatgattgacaccacgaaattaaatgtggcatccgtatcggaaataatgacgaataacgctgtcttttgctctccaagcgtgtcaagctccagctcgtcatattccatcaggtcacgcagctctttgatatcaaatggtgctaaccttgcaccgcagctaataagtatggatttagctgtttttcccgcagccagcttgtatttcttatactgccgtactgcaaagtggttcgggttctctgcttccagctcctcaaacagcaaatctacggcatttttgaaattctcatcgtcctctctggcttcgcttgcatcaatcagatcaatcagcatggcgaaattctgctcctcctccggagcttcataccagatataagcgatcagtgccgtataatagagcttttcagccttgatccagaagtcctcaccggattgctgtccctctcctttggtgttgactatgatcgtgtttacaagtttcagaatatccttttcgctccgtaaataggcgaaaggattatagtgcatggattttgcaaagtttatggtatttaagacttttattttatatttgccccttttcagcatctttccgcactcgactaataccgttcctttcggatcagtgacgacatagcttgagtgcatctgcatcaggttcggcttcacaaaaaatctcgtcttgccggaaccggaaccgccgatgacaagaatatttttattcctcgcatacttcggctgctttggtctgcctgacatcatcagcctctccgtctgggttaaaaggacattgttttcaaacacagagtccatgtatggctctatgtctttggcatttccccaccttgcggaaccatactccttgccatgccggaatttcttggcgttcttggctttgtagtacaccacaagccggagggctatgccgcagcctgctccaatcagtaaatctcttgggtggaagctgggcaggggattggaaaaaagcgtatcaaagccgttcatggctgcaatcatcttggcggaagcatctgctccctccgatactctccacagccacgccaccttgtcacagaaatagcctgcaaggatatacgggacattcaaaagcagcagcttcttggcgtccgcacctttcgcctttgctttcagattttccgggacagcctttaggtctttggttatgcctgcaatgatgctgctcataggctctgtcccctgtccttatttttctcccggctcctctccctgttcttatcctgtgacactgcttccctgaaatgctttaatttctcccttacggaagtcctgcctttctttttctcattaccataaacaaattccttgaatgcctgcgacagtgcatcggcatccctgcccttgaaaaataccagatacttgggcggttcgcacgtcctgtctttcttgacagcaaaatcaacattatatttacgagctacccgctcaaaggatttgatgttgctgtccgtcacttcgatagacgatactcccacgccctctcccaccagctttttcacagaagttttaccatgcgatttctgtgatttctgcttctgatgattcagataaatccgcattgcagctttcagtacgctggcacttagttttgaggtcttaatcacaagggcgattgtcttttgcgttacttcctcctgcataagtacctcctgatccattgttatctgactgtaagctccgctaaggtggaacatacagccgatgcagtaaatatttcataagctctcctttccgcttttggacatcgtgtccaaaagtctgtaaacgcaaaaagggcagctataaacctttatggtctataactgccctgacgctgtgtaccatatttaatttatctgtaccggattaccggacactgctttgtctttttacctgttttcctgcgttccaaagcaaacaccatatccccggtacgttcaaaatatccaatatctttcttccagctcataccgcatttgcaatgctgcaaaccgataaactgctgtttcattttcctgccgcactccgggcatatcttattgttgcttcccctctttttctttggtaaatcaggctttttctcctttgcgggcttttcctccggtattccgttttccctgatacggatttcataacgaggcatctttaaaagatatgcttggtaaacctcatcaaagggaacccataccgcctgtgattccagctttttataaatacgttccgtaatttcccttgctgcttcctctgtgggcatttccccgttttctttataataagagcaggtttcccgaaacatttggtcagcaattttcattttctgcttctgctttaaatccttataggttttatttggctgcttctgccgcttatatgcaagcgaatgatgattttgtttcatataatccctctttaaaataaattccgcttcaattattataacagaagtctttttatcataaaatattttgtctgtatttattattccaataacataaccgtacacatatctgcccggatatgattcttctccattgaaacattatcgaaaagcaatgcctgaaacagcacatcccgcacattatcaagcaaaacgatcttctgctcctgctccgtcaggtgttcaaattccacgccatcccacacaatagtttttcttgcggcttcacaataagcaaacagaccgaggatatatttatttgacataataaaaccataggtttcctgcccttcatagatcattctgtatctgtccgtttctttctccggcaggctgaaaatacactgtaccgtttccagacacaccctgccgtcatattccggcttcagttttcttttatatctctgcacttttgtgtaaacttcttcccgttccacgacggaacgggtgcgcttaaactgcggctttttgcagagcatatccaaatccatatatacattgttgattatgcttttccctgcatactgcccgaaggttctgatccgcagcagatatgtaagaacttcatttaacttttcctctgatatgataaactgaaaaggcttactgccaaattccatccgttcaaaagccagcggacagctcccctttgcaacctccctctccattaccctgttgatatctctcattgattccattgttatcttcctttccacctttagacatcgtgtccaaaagtcattgaacataaaaaggcagctacaagctgtctgctcataactgcccttacgctgtgttgcttataatgtaattcctgcctttattgcaaagtcggcttttctgtctgtaagttccttctgtttttcctccggcagactttttaatacgccgccataacctttctccatcagcggcgttccctttgccattaaatagagctttgtatcaagccattcctgccacagattttcaaacatactctgactatccgtgaaggttatcacatcatcaaagccctgcggctccttgtaatactgcaattttacaaagccgtatcttcctgcatccatgacaaggatattctcaagcccatacagctctgcaaacgcctccgcaacccttctgcacttttcctgttcttctttcgtgatatatactttcttctccataccgcaccgcctaatctattttttaaaccattatccacctctggacactctgtccaaaagctgcctgtgaatatatttattatctccgcaaaaatctttccaattctttcagacaatccctttttcctcccagccgccgccatacatatcatgctgtacctcctgctgataataatggttcatagttgagggagcattataaagtgctgtaaccatgtatgccttaatgttggttatctttgtgacagtatcgtgcatacagccgatcacatactccagatgcccgctgttgagcttcaggaatttcgattttacaagctcatatgggtaatcctctcccgctattctgaccgttttacgctttacgcataccacttcacagatgacctcaaaaagctcctcatacaaatccctgtcctgccttttatcatacttcatgtgatgctcatactcaatattctgcttaatcagctctatgtatgcgttcacgtcctccatcacatcaatcttatcgtttctctgctccgggtctcctgattgattgataggattgttatagctcatgtcagtattattatagtcagtataattaggggctggttttccgacctcttgaagttcgttttcccgacctcctgaagtctgattatccgaatccttgaagtcggtttttccgacctcttgaagtcggcttctcaaacttcttgaagtcggtttttccgacttctgcaagtcggcttctccgtcctcagtaaaagcacctttatcgcctccctgtttatccggctgctcatcattttcctctggaataacaaagttcttcacataaataatatccggcttgccaagtcccctgcgtatccgttccaccagaccgatccctttattggtatctaattcggcaaggacttttatcgccttatccttgccgcatcccaaatcctccatgatactgtccaccgtataaatgatatacgccctgttttcatcatcaagccagccatttttcatggaaagtgccatacggtcaagcatcagtccatagaggagcttagcatcgctgctaagccccttaaacctctcgtccttaatcagcagacgtggaacacggtaaaacgaaaactgctccgcttcgattccgtagtaataatcgaatttgattgtaccgcccattttccgtgcctcctttactgcttgctcacgccatttgcggcgttccattcctccaatagctgatagatgatattttctatttcctcactggaatactcctccgtaaaatatcggctgatcctctcgcctttgattgtgacctttctttccttcggcttttcctccgtcaaaatgagccttaccattgcaagggtcagctccccgttttttccatactccttcagttttgccgactggtgggtggaaattgctgcacctgtttcctccagaatgacctgtacccattcctgcgcctgttccgtgagaaacgatatgtcaacgccctgcaccagaccgattttcttcttatcgaccatatccagcaattcatcagacagacgggcaagccatatatacctttgcaccgtctttccactctctccggcagcttcccccacttcgtcaaggctgcttccgcttccctttttgccctgatgtttcatggcttcatacttcattgcataagcccttgctttttcgctgggtaaaatatcctcacgctgaatgttggtatccaccatgataaccgttgcttcatcatcgctgtaatcccgcacgaacatcggcatggtggaaagccctgccagctcgcacccgtgcttcctgcggtgcccggcaatgatctcatagccgccccctgccctcggtcttgcaataccgggcattaacacaccatagtttctaatgctctccacggtttcctgcatcttttcatcgtcaagcaccttgaacgggtgtcccttaaactcatgcagctcggaaagcggtatctcccgcacctgctctgtgcctgccggagcttgggaagctccgaacagatcatcaaaactatttattttgacctttgatgcacttcctgccttactcatcacgaagcacctcctccgtcaaagactgataggcactcgccactttccccttcgggtcatgccgatagatgctgacaccttctgctgaaatttccgcagcccttacggaaatcgggatactgttctgaaatatcctaaccttgcttccataattctcaatcagtaatgcactgatgtcctttgcatagttggtgcggttatccaccatcgtcagcagaatcccctctatctccagttttggattgatctgccgctttaccctgcctatggtcttgataagctgctccaaaccttttacgggcagatatgccgcctgcacgggaattaagatactgtcggcacaggcaaaggcatttatggttatcatgccaagcgagggcatacagtcaatcagaatgtaatcgtagtcctcccttacctgctctatgtaggaacgcagcaccagctccctgctcatggcattcacaagcgatacctccagaccggacagctcaatatttcccggcatgagggaaatgccctcctcatgctccaaaatgccgtatcccttttccatttcctcatcattgataatatttgccatgaccgtggcaagcgtgacctccagcttgtccggttccgtaaagcctaaacttgcagtcaggctcccctgtgcgtccgcatcgatcagcaggactttctttccctgctttgccagcccgattcctaagttgcttgtggtggtggtcttacccacaccacctttttggtttgcaattgatataactttacacatgatacattctcctttttctatgctgttttctatgatttctctgctacattgctctttcttacttccacatacgctctgtaaaacttctttgtccccttgttcgggtacaaatctgaaaattcggtaacttcaattttggaattattgttcaatatctttccgaaccaagtaatatcgttcttcgttcccatcagtctgacctttaacattagtctgctcctccaaacagggcatacagctcccggttgtatcttgcatactccggataacgaatctgtaccgcctgccaaaaatatggtgcgtaggcacagcagaacagttcctccaccgtgtaattcctgcactcgtcaatctgctcctccatatcctcatagtcaaaaacactcggtgtaccattacagtacagattaaatgccattctgactactttcacgcttccgctggtctgccagccttcctgcaggcattccgttttcacgcagcctgtcttaaaatcataaatgcttttaatatttcttctggtatcgtcactgatgccaagacagtagcagagtgccttgtggtaaacatcctgataccttacctcttttaacttctcgtaatagaatttctcatgtgcatcgctgataaaaataatgttttctttcttttctgctcctaacgctgtactgttcattgtatttacctccaaattttatttttgaccataacaaaaggacactcccaaattctcacttggaaagtgtcctaaaggtacataccctataaaattaaatgtcgcacaaaacgtattatcaagtattattccgtattatacgtagcaaatttgtagtaaatttgtagtaaatcacaactcaaaatcgctgaaacccttgattttactggttttctttactcaaagttttcatcgtcgggaacagcagtacatcgcggatcgccgggctgttggtcatcatcatgaccatacggtcgattccgaatccgatacctccggtcggcggcataccgatggaaagtgcatttaagaaatcctcatcggtgtggttcgcttcctcatcaccagccgcaaaagcctcctcctgggcagcgaaacgtgcgcgctggtcgatcggatcattcagctcagagtaagcatttgccatctcccagccgttcatgaagaactcaaaacgctctacatagtccgggttctccggcttcttcttcgtgagcggagaaatctcgatcggatgatccatcacgaacgtcggctggatcaggtgctcctcgacatactcctcgaagaaaagatttaagatatcgcccttttcgtgacgctcctcgtactcgatgtgatgctcatctgcaagcttcttcgcctcggcggtatccttcacctcgttaaaatcgacgcctgcatacttcttcaccgcatccaccatggtaatgcgctcaaacggcttggagagatccatggtatgctccccgtaggtcagcatctcggaaccggtcacttcctttgccacatagcggtaaaggttctcagtcagatccatcatgccgtggtaatcggtatatgcctgatacagctccatgagtgtgaactccggattgtgtctggtgtccagaccctcattacggaatacgcggccaatctcatagacacgctccatgccgccgacaatcagtctctttaagtaaagctccagagaaatacgaagctttaagtcctcgtctaacgcattgaaatgtgtctcaaacggtcttgccgccgcaccgcccgcattcgacacgagcatcggggtctcaacctccatgaagccctgtccgtccagatagcgtcggatcgtgctgataaccttggaacgcttcacaaatgtgtccttcacatcctcattcatgatgagatcgacatatctctgacgatatctggtatcggtatccgtcagtccgtggaacttctccggcagaatctgtaagctcttggaaagcagtgttacctctgctgcatgaatggaaatctcgcctgttttcgtcttaaaaacgatacccttcacgcctaaaatatcgccgacatcatactttttgaaatccgcgtaggactcctcgccgatgctgtcgcgcgctacatagatctggatacgtccctttaagtcctgaatattgcagaaagatgccttacccatgacacgtttgaacatcatacgtccggcaagagatacctccttgccttccatctcctcaaaatgctccttgacatccgtgctgtgattcgtcacgtcatacttggtaatgacgaacgggtcctttccgttctcctgcagttcgtgtaacttatcataacgaaccttgagcagctggttgacgtcctgctgctggttattattctgctctgccatgcttttcctccatttatcctgcgccgcctgtccgcatgaagcggagtccgcagacggtcatgctctactcgtttgatgatctgtgaatggaaagtatcttgtactcgaactctcctgccggtgtcgttaccgttacggtatcgccgattttctttccaagaagcgccttaccaaccggcgactcattggaaatcttgccctttaagctgtttgcctctgtggaacccacgatcttgtaggtcagctcctcgtcgaattcacagtctaagatctttacctgacatccgatacttaccttatctaagtcagcctcttcctctacaaatacttcagcattcttgaggatcttctcaagctcttcaatacgtgcctcaatatctctctgctcgtccttcgctgcatcgtactctgcattctcggacagatcgccctgctctcttgcttccttgatcttctgggagacttcctttctcttgacaacctttaaatcctctaattcgtcctccagttttttgagtccttcatacgtcagaatgtttttcttgtccattactctctacccttctttgtaatttttatcagttcaattttcataaaaagcttcttcaaatcggtcacgtccaagcttttctctctggtgatgcatgctcttaacaatcacagtattataaccgataggcaccatgatgtcaagattttcgccctgtttccagggctttttgtggatcggaatgtaggttgccgcggcgcagatcatctctgtccggtatgctccctcccactcaaaatccaggattaccttccgggtcagaaacgtttctctcacccccgcctgtccttcccacgcagacagtctggtttttggaaaaaccatcaccaccagcccgttctcctcatacattctctctgcaaacccggaaaaatatgcggggcgtccggtgtacaccgtaagataattcagatcgtctccgatctgttcgagcacatcgcgcacatccgccggttcaaagacatggctctgctcctcgtcaatcaccacaagctccacgcgctccgggcgaaagctttgcgcctttaagatcgccagaaataccggtcggaaatttctaagaaactcattggaataggacattcctatgcctcatatccgtttttctcattatatgactccacttcccggaataatgcctcgagctgctcgtaattctccacctcgttgatccttcctcgaagcttggacgaattacggtatcccgcggtgtaccatgccgcatgcttgcggatctcacggatgcccgtatagtctcccttgcagtcgatctgcatctttgcatggcgcagaagcatctccgtcacctccgagaaatccggccgggcaaggtgctcgcccgtatcaaaataatgcaggatctgacggaaaatccagggattgccctccgctccgcgcgcgatcatgtagccgtcgcagccggtctgctctgccatcgctgccacatcctccggcgtccggatatccccgtttccaatgacgggaatcgataccgcctccttcacctggcggataatgtcccagtccgcatgtccggcataatactgctctctggtgcgcccgtgcaccgcgaccgccgccgcaccgctctcctgcgcaatgtgcgccagctcgaccgcattgacgtgtgcatcatcgaatcccttacgtatcttcaccgtcagcggttttttgatcgcccgcgccgtcttctctatgatctccccggcaagccgcggatttttcatgagcgcggagccgtccccgttgttgacgaccttcggaaccggacagcccatattcagatccagaatgtcaaacggccgctcctcaatctgcttcgcaatctcactgataatatccggatcggagccgaaaagctgcagcgataccgggtgctcctttggatcaatggtaagaagctcctccgtgttgcggttcttatacagaatcgccttggcgctcaccatttccatgcacaccagccccgcgccctgttccctgcaaagcaagcgaaatggcaggtcgcttacgcctgccattggtgccagtatcaaattattttctaaggttacatttcctatctgcagtgttcggattattgccacgctgccaccctcattttctacttatttaatcttcccggatttacggttctgctttttatagatgagattcatgcccttcaatgtcaggttcgggtcatacacatcgatcattgtggtctcatttgcaataattctgcccagtccgccggttgccacgaccttgacctcgcccatgttcgcctcatcgatcatatgacggatgatgtattccgtctgtccgatctgcccgtagacaagccctgcctgcatggaggagatcgtctccttcgcgaggatgctcgccggcttgcggatctcaatctccggaagcttcgccgcatcttcccacaatgcttttgcggaaatgcggattcctggagctgtaacgccggatacaaacgcgccgtccttgtccaccagatcgtacgtggttgccgtgccaaaatcaaggacaagcaccggtccgccatacagctcatacgctgccgctgcatccacaatacggtccgcaccgatctggcgcgggttctcagtcacgacacggataccggtcttggttcccggctccacaataatcgggcggatgctaaaatacttgataatcgccccctcgagggaatgcatcacattcggaacaaccgatgcgataatcgcatcctcaatatcgtcatgtgaaatcgaattctgctccagcaggttgctcaacagcatcccgtattcatcggatgtacggggcattttcgtcgtgatacgaaaattcgataccacctcgtctccccggaatactcccacggtaatatttgtgtttccaacatcaatcgtcattatcatcgtccgtaccccctatattcccacatataaaaccttataatacatctgcagcgcttccagcagttcctgttttgtctgctgtaactgacggatcttaagtccgcagccgatctcgtcgtacagcagatcattttcatcgcaggaggtgcggaattccagttcgcccgtttcgctgaacaccagctgaaaaataccgcccacatcctccgtgaaaagcacgcacatgatcttcagttcattcttgatctgctccggaagacctttaaagtcctcgttcagataaaattttttattgtatgcgctcgcaccgcacagtaccacttcttccattcagacattcctttccaaaccgtttccacagacactgtttgcacagtatcccttacacatatccgtagacaccgcgcacagagacttctcctgcagatacaagtcttctgctctcccaggtatccacgatcagctcgccccgcggcgtgatgcccatcgcttttccctcaaacggttccttcggatcaagcaccttcacgatctggttccggttgatcagatgcgtatcgtactccttcacaagaccgctcagatcctcggtctccatgaaaattgcataataatgttcaaactgttcccatacttcctcaatcagagccgcgcggttaaaatgttctccggtctccatgtagagcgaagttgccaccggggcaatctcctccgggaacgattcattgtgaacgttgatgccaatgccgatcacaatgtgattaacataatccatctgtgcgctcatctccgtcagaataccgcaaacttttttcccgttcatgacaatgtcattcggccatttgatgcccgccggtctgcctgtcgtcttcacgatcgccgcagacaccgcaagcgccgccaccagcgtcagcatcggcgcattcacgggcgacaactccggctttaacatcagcgtcataaaaatgccggctccctgcggggactcaaagcttcttcctcttctgcctctgcctgcatcctgctgtccggcgaccacaagcgttccggtagggtaatcttcctccgccagctgcttcgccctggtattggtggagtcgatgaccggatagtaaaaaatctcctgtccgacccacgcggtcttgcggatactttttaattcttcctcgctcagtgtgtccggcaccgacaacagcttatatcccttgttcggcaccgcctcgatctcatacccggcttccttgagctggttgatgcccttccagaccgccgtccgggatacgccgaacttttcacacagatcctgcccggacacgtaatcgtcggcatctcttaaaacggaaagtagttctgctttcatgatgttccctcttattctcccagtgtagcaagcatgactgccttaatcgtgtgcatgcggttctctgcctcgtcaaatacaaccgactgctcactctcaaatacttcgtcggtcacctcaagctcgctgtaaccgaatttttcatagacttccttaccgatcttggtctttaagtcatgaaatgccggcaggcagtgcatgaagatcgccgttggcttggcatttgccatggctgccttgttgacctgatacggcatcagatcccgcaggcgctctgcccagacttcgtccggctcacccatcgatacccagacatccgtgtaaatgacgtccgcgtccttcgtgccttctgccacatcctcagtcagcgtgatcgacgctcctgtcccggccgccacttttttgcagtaatccaccagctcctcgttcggaaaatatttcttagaagtacatgcgacaaagtccataccgagctttgcgcaggtcaccatcagggaattgcccatattgtagcgggcgtcgcccatgtatacaaacttcacaccctttaagtgttccaggtgttcccggaccgtcagcatatctgcaagcatctgcgtcggatggaactcattcgtcagaccgttccacactggaacccctgcatattttgccagttcctccacaatgtcctgtccgtatccgcggtactcgataccgtcaaacatgcgtcccagcacgcgcgcggtatccggaatgctctcttttttgccgatctgcgaaccggatggatcaaggtaagtcacatgcattccgagatcatgtgctgccacctcaaaagaacaccgtgtgcgggtgcttgtcttctcgaaaatcagcgcgatattttttccgatcagactgtcatgcagaattccctgcttcttcttgctcttaagatccgctgccagatcaatcaggtagagaatctcttccggtgtgtaatccatcagttttaagaaattgcgtccttttaagttcatgattgcgttcctccttgtcgcttagtgcttccagttgcagaataaacaggctgccactctcgtgacagccccctatttcaatctgatctatctgatgttctatttgttctccagagctatttctgtcacagattttgccagccctgcgattccctgaatctcagacggaatgatgatcttcgtcgccttgccgtctgccgcctttgcaaatgcctcaaggctctttaactggatgacgccctgatccggagccgcatccttgatcatgcggagaccgtctgcgtttgcctgctgaatcttaagaattgcctcagcctgaccttctgcctcgcggatggttgcctccttcttcgcctctgcacgaagaattgccgcctgcttctctgcctctgcatcgagaattgcggattctttcttaccttctgccacgaggacggtagacttcttctcaccttctgcacgaaggatcgcttctcttcgctcacgctctgccttcatctgcttctccatcgcatcctggatcgctgcaggcggaatgatgttcttaagctctacacggtttaccttgatgccccaaggatctgttgccacatcaagtgttgctctcatctgcgtgttgatcgtctctctggatgtcagtgtctcatccagctcgagatcaccgatgatgttacgcagtgtcgttgcggtcaggttctcgatcgccatcagcgggttctccacaccgtatgcatacagcttcggatctgtgatctggaaataaacgaccgtatcaatctgcatcgtaacattatcctttgtgattaccggctgcggcgggaagtcaaccacctgctctttcagggtaaccttcttcgccacgcggtcaataaacggtatcagcaggtgaagacctaccggccatgtcgcaagatatccgcccagacgctccacaatgtacgcatgcgcctgcggcacgatcttgatacaggacaccacaactgccaataccagaataaccaaaatcaaaaaagctactaataatcctcccattatctaacctccaattattttctgtccggatctctaacactattttccccgttaaatatcatattactatatttgatttgaaaatacaagaaaagccgtaggaaatgtcttgtcatttcccacggctctgccatgatacctgtttaataaaatacgtggtttccgattaccacacccgcgtgtcctcgggaagctctgctaaagcaggtagcgccgcccgtattgtcagcaccgttgattgcttcctgtgccgcctgaatacaactggacttcggaccgtttgccgcaatacttgcaacggatcctcttcctgccggcgggaactgtcctgcctgatatattacaccgtaaatgctgcccgcatatctgccggatctcacacggttcataacaaccgcaccgactgcaagctgtccttcgtagcactcgtttcctgcctcgcactgaatcagtgcggcaagcagtgtcacgtcatccaccgaagcggccactgcagaattctgaacggtacccgcgctggacacctgtgcggactttgccgcttctgccgcagccttcgcagctgctgcctgctcctcctcgatcgtgacagcctcaccgagtgcaagctccgtcgtcacatactctgcgctcacataaccggtggttcccttgtaatcgatcgcaacccatccgtctacggtctctgcatctgcatccagcggaaaagtcattcccgtcgataccgctgccagcacggacgcatccgggtctgcgctgcttctgatgcggagtccgttcgtctggatctctacctctgtatcaaatgtatcgttcgcataggtatatgcttccgatcccgtcacgcagtaggaatttttcacatatccgtctacgtttccggattccacatgtgtccaggtatcaccagcctcagtgatctctgccacatctcccttgtataatttgccgacaatcgctgcattctcgtctccggattccctgatatacaggaaatcgtcgacatctgccatcaggcggttctgccactcctgctcttccgcagacatctgatctgcatccgtgctctgtgcatcctccggctgcccgccggcgtctgtctgctctgcatccgctgtctgctcaccatctgcctggctctgcgctgcctctgtcacgctctgctcagcatctgcctgctgtgcctctgttgcttcggcctgctgcagctgtgcatctaatgtctccgcagcttctgtatccgaaaccgctccctccgccgtagcgaccagaagtcttcctgtctggttcacaccggctgtcgccgcttcaatatcaccaaatgcctctgcttctaactgatctaaccgggcaacaactcctgctgttccccctgtagcgaagtccgtctctgcctgtaccgctgcgttccttacctgtactccgtcaagatcagcagcctgtgcgattgtgctcatcatcaccagggatccggcaaccacgattccctcaatcgctcttttcttcaaactcatagaaccctccatcggtgtaatcacatgtttattgaaatagtattacacctttgtgctgttttattcatattttgttacaattgttacagatttgttacagcaggaattataacaaaggtactgttttttgtcaagttttcggggctttccacagctttatgccgttgtttttctatagaaagaggcagccggaagccccgttttacaagacttccggccgttttttgtgcattttgccagtttttcgttttatgaagattttcttaagaaaatacctcttcaataacctcatcgatcagcatgtccgccgggtattttttcgctccttcggctgccgcctcacactgcgaaacaccttccgccggaaaagcgctcccaaactctgcgctctccattctgtcggtgccggtctgcttcttctgtatatatctctggattctgtttatcttatgtaatgtgacaatcagaagcagcacggtgagcagactgcacactgcaatccccatctgcaactgttccggtgaaatatgttccagccagagcatgtccattacctctctttccgatcagactttttcctgcccgatttcttctatattataaggaatctgcacggatttgaaaagaggctttccccgtgatctcgccgcaatttgcgacaatctttttacatcccatgccggcatcatccgcaccctttttccattgccgccacaaagcccgatctccaagtcttttcttgacttttatgcataagggtattataaataagggaagcagaccattaggaaagggattcttactatgaagaaaattgttatgaccggagggggaactgcagggcatgtaacgccgaacattgctttatttccagctctgcagaaggaaggttatgaaatatcctacatcggttcctatgagggaatcgaaaaacggctgatcgaggagcagggggtaccgtattacggcatctcgtccggaaagctcagacgttattttgatccgaaaaatttttcggatccgttcaaagttttaaaaggttaccatcaatccatccgtcttttgaaaaagttaaagccggatgtcgttttctcaaagggaggctttgtctccgtgccggttgtgcttgcagcaagccgctgccatattcctgcgatcatccatgaatcggatctcacgccgggactcgccaaccgcattgcgattccaaaagccacaaaagtatgctgcaatttcccggagacactggcacatgttccggaggataaagccgtgcttaccggcacgcccatccgcgcggaattactgtccggagacgccggccgcgcttttgcactctgcaattttacagattccgcaaaaccgacgcttctgatcgttggtggaagcagcggctcccgtgccatcaataccgccatccgggatctgcttccggagctgattaaaaattataatgtcattcacctgtgcggcaagggaaatgcagacgcttccctgaacgccatcgccggttatgcccagtttgagtatgccaacgaggaacttgccgatctgttcgcgctctcctcccttgtcatctcccgcgccggagccaacgcgatctgcgagcttctcgcactgcgcaaaccgaatatcctgattccgctcccggcagcagccagccgcggcgatcagatcttaaacgccaactctttccgttcccagggattcagctatgttcttgaggaggaagagctgaccaacaccactctgttggaagccatcgaccatgtcttccacaaaaaggacgcttatatcgatgccatggagcacagcaaggtcacaaactccatcgagacgatcatgggactgatccgcgaggcatcttcgcacaaatagcggttcctgcatagaaagaacccgccgcaataagcatattgtgctttgcgttgataagtaatattataagaaacacactcggggatttcagctggaatgcagatggaaattgggttcaaaaaatgtggcatttctaaccagccggatgtttgcatcttcgatgatccgtgtctttccaagtttggagcactctcagcgatttcactcaactttttgatcggatagtgttttgtattgctatcaaggtttccgaactgctccataaattgagacttaacgagttcgtcagtagcagaaataagctttttataagcctccatcgtttcattgattgaccaaagagtttcggccagcttgcgctgagtcgctaaatcaggcaattcaaattcaagcgttttaagatcgcgccagttaatagttggtgataacgatccaacggagatcttgatggcagcatccaagaaatagtccgagctgataaacagcggaaagaagctcttgtcaattacgtcttctctaggtcgcagaaccattccatgtgcagagaaaataccatcaaatggtgcgatggcaactttcttctggtaggctctacgttttccgaagagcacatctcctttgtgcatcaccagtttttcaccgattggagctacctccgaaccgaatcgagtaactttgaggcttcctgaatcaagatgttcaagaccaagataggtgaagcgatcttcttcaacaggctttttcttttcagtgctgttgattgcaatctgttcaaaccgatatttcgccattatgcacacctccttgcggaagcggtatgaccggtgaaatccttgtggccagctggcccgataaattgagatttcaccaattcatccgtggctgcaatcagcttctggtaggatttcttcgtgttatccatagcccagagcagttcagccaattccttttgtttccccatatctgggagctcgaactcataattcttcaagtgttcccattttacacgaggcgaaagggagcctgcggatttaccgacagcaaactcaaacagatcatcgttctggatgatgaacgggagcaactccggcaaaatacggtcaggttttgcttcgataacagtgatatcaccagagcagatgccatcaaatggagcaacagcagcctttttcaggtaggctcttcggcgaccaaacaagacattacccttgcgaaacatcttactgaacgtgttttcgctgccttcattccaagcagtcaatgtaatctcttctgggatcaggtgttccagaccaacgataggatagccatccttgctgcctttgcatgtctccttatgttctacagcgacatcgccaagaaggactttactcattgacatctgcctcctttactaatagtgcgttcaatttttcatagctcagtttcatcatttcggaagcagccagccaactatcatagtgttcctgaacattgcggttatctatttcttcttcattgacctctggtttcacatacagaggaatgctcaaggagaagttgttatttgcaatatcctgaatagtagccacctttgcaaaatcagcatcatcgacatagttgtcataagcagtagcgatacgagcgatgtggcgttcttccaaatagctctgtgcgtttttacgctcaacctcatttaccgcattgatgaacaacacctgtccacgacgttcagggcgcttattcatccgacaaatcatgatacaagcttccatcggagagttgtagaaaagattcggtccgagaccgataacacattctactttatcgctgcgcaccagtctttcacgcatcgcactttcctcattacggaaaagaactccgtgtgggaacaagatagcgcatcgaccagtatcgtccttcagacttgcgataatgtgctgaaggaatgcataatcagcacggccttgcggaggcacacccaagaagttacgaccatatttatcactttcaaatgctgcgcgatcccactgactaattgagtacggtggatttgccaggataaggtcaaatttcttcagtctaccgttctcgacgaaggccggtgctttcaaagtatctccatttacgatattaaagtccttaactccgtgcagaaacagattcatcttgccaatagcagaggtaagcgcattgatttcctgaccgtaaacagccacatttcgccattccttaccttgctcttttaagtacgcaatagcagaaataagcatacctgcactaccacaggtcggatcatagatagattcccccgactccggcttcaacatctcggtcatcaaatgcacaacagttcgattggtgtagaactcctgtgctgtgtgaccgctgtcatccgcaaactttttgataaggtattcgtatccttgacccagctcgtcttccgggcaattggcaatggagagagtcttggtactgaaatgttccagcagatctttcaacaacctatcagggagcctattcttatttgtccaggcaccatcaccaaaaataccttgcagcttgtcaatgttcgcattttccaccttgcggaatgcctcaacaatggccacaccaacattttcggatacggcacgaacatcgttccagtgatatcccttgggaaccacaaaggtgtggatttcgtcagcatcaaattcggcagcgtcatcaccatattcttcgatagcaatggcagtttcttcatcgtatacatcacagatacgcttaaaaaacagcagaggaaaaatatattgcttataggcaccagcatcaatgttggttcttagaaggacagcggagttccaaagataggattgcagttcctcaatggttattcttttactcactgatataacctccttccagcaagagcttacgcatcttttcttcggctgcaatcatttctttgtaagcctcaaaatactgtctacggatttctgccggaggaacaatttcctgctccttcttttcgatatagttgttaatagcaagagaaaagtctttctcccgaatttctggaatcgtaacgattttgaccttttcgataacatcttcgtattccatatagtagttgaatacggtttggatatcttcttcggtcataatgttctgtgctctctggggagtataaattccggagccatcaatcatacaaatacggccacgatgctcaggagctttatcattattcaagaaaagaatgcaggcagaaacaccagtggagtagaatacaccactggccatcgtaatgatagcttccagtttatcggattccacaaggtgcttgcgaatctcaccttctttaccgcttctaaagagcactccctgcggcagcaccacagcacaacgaccagttttcggattcatagacttaatcatgtgctggagccatgcaaaatcaccattggaatcggtcgggcatccccaaatatttctaccgtaaatatcgctgctgaattgttcagctccccagtttttgagcgaaaacggaggatttgcgactacgcaatcaaaggtctgcaatgatccacgttccagatagttcggggatcgcagagtatcgccctgtgtcactttgaaatctcgtgcaccatgcaagaacagattcattcgagcaatggcagatgttgccagattcttttcctgaccgtagatttttccataggtcaacttgtcatcatgcatgtaccgaatagcctcaatgagcataccacccgtaccacaggctggatcgtaaacggtctctccggccttgggagccattagcataataagtaatttgacaatcgaacgcggcgtgtagaattcaccggcattctttttggagagatcagcaaatttcttaatcagaaattcgtaactgtcacccattacatctgcggaataattgttgttgccgaccttgattttagacatatgttcaatcaggtctttcagacgttcgtcagatagttttgttttgtcggtccagtttgcatcgtcaaaactgctgaacacgccactcagcgtatcaggattagcacgttcaattccattcatggctgttacaatagccacaccgacattttcacttgcttcacgaacatccttccagtggcagccctccggaatgacaaagcggtgattttccgggaagctagcgtattcctcgtcaccaccggattcttcgagagcaacttgagtttcttcatcataaacatcggagagacgcttgaagaaaagaataggcgttacataactcttatattcgtcctgattgatggggccacgcagaatattgcaggcttcaaacaggtgagaaaacagcttctgactggttgtttcttccggatgtgcggcactggcttccaattccatatcagctatatccatagcagattgcatcatctcagcacgacctcctgtctttacttttttaccggtggaaggttttacacctacgctaccactttcttgaattttctcaaatttagcaggatacttgttttcaaattccaggagaattttcaggagacgctcgtccaaaaatgtaagagcgtgttttctgatattagtaggtacaccataatacgcctcggcaacagcaccggtgatagccgccaaggtgtcactgtcacctccaatagaaatggcgttgcgaatagcatcctcaaaactggtagactcaaagaatgcttcgagtgcctgagggacggtatcttggcaggtttcgttaaactggtaggtatcacgaatggaatctaaggtgaagttaatcggatagtagttcttcacgatataatcctgaatttccatcagactgcttccagtacgagccagatagactgcaatggcagtagcttccgcccccttaattccttctgggtgattgtgggttgtctcggtaactgctcttgaaagtgctgcggcttccgcaacagaattagctacatagccacatcctccgacacgcattgccgctccgtttccgtagctgttgtatggttgaggattgtccgaatacatccaacgataaaaggaaccaccataaccacaatgtggatagggacgtccaattcgctgcatagattcaatcgttatattacttaaatcactgtagtccggcttgcaatgcatcaaagcatcacatacagccagagacatgacggaatcatcggtgaagaaacattgatgcgtaagaaaatcaaaatctttcgacctatgattatcccattcaaatctggaaccgacgatgtcgccaatgattgctccaatcatctagttttctcgctttcttttttgttattagtaatactgctcaatatagctataagccttatcaaagacatctttatccttgattttgtatttgatccaaacaacactgcgaagggctttcttgacttcctgcttaccagcagtagtgctctgccagccatcgaaacgcacaatttttacaatgctgtcaatatcagcaacgatgcgctcaacaataacaggagtgcttcggtttttcaaaccgttaaaaagttccgtcagtgcagcgattcccttatcaacttcctgctctggcactacttctttttctgcctgtgctgcttccttcgccaattccaatagaagtttcaagaactcgatgctggtcaccagaccctgttcgtgcttttctcgcaatatttccagcttttcaccaagcttgatgaatttcggatccttggtgtgattcatgattttggctacgagattgatttcgatctttttggtggtcttcttcaaatctttctgcttttctaagaactcatcaatcaggtcggcatccattgccaggatttccacgtcctcatccgcttcgccaacggtcaggttctgatgaacaagctcaatcgtttttgcgcccaaggatgcccagatcaatccaccacggccatccgtcggcttcacagattcatatacacgagacagccactggtaatccgctttataagcattcagaaaaacgtctggtgataacgcatcccacgcacgattcagcacacggtagtcagcagcaaacgcgtctttttctttatttgttggtaagcactcctgcgctgccatgagaccttcccaaccttcaattgttctatcaacacccaagaagtatcccaggcatttttttaggagtgtcggaagctgcttcttgatttcttcaatgttggtgatgatcttacgcatactgttttcgtcaaaatccagtgcacgtgcgacatcatcaaaaataccgatataatcaacgatcagaccatgtgtttttccttggtcataggtacggttggtacgacaaatcgcctgtagaagggtatgatccttcatgggtttatccagatacattacctgaagaatcggtgcgtcaaaaccagtcaacagtttagctgttacaataacaagttttaacgggcttgcaggatcacggaaagtgtctaaaacctttccctcagcatcacgatctctgcgatatttcttataacgatcttctttatcgttattggtatccataacaatggtgctggcttcttcgccgagtagctcatcgaggacagccttatacatcaagcagcattcacggtcatagacaacgacctgacccttgtagccattcggctcgattttctccttgaaatgtttagcgatatgctcacataccttgcgaattctagccgggttgtacatgattgccttcatgtttaccctgcgagaaagttcgttcttttcatctttgctaagtccagcctcatcggtcatagcctcaaattcacgatccagcttttccttatccacatgaagctctacaggaaccggctcaaagtgaagaggaagcgtagcaccatcacgaatggaatcagaaaaggaatagcggctcatatagccagtgcgatcttcctcggcaccgaaggttgcaaaagtgtttttatcaacacgattgataggcgtaccggtcaatccaaagaagaaagcatttggcagagccattctcattttttcacccagatcaccttcctgggttctgtgagcttcatcgaccatgacgatgatgttatcacgaggattcagctcaccgctaacctcaccaaacttaaaaatcgtagtgataaggatttttcgcatatcaccacggaagaaggaaagaagttcctcttttgtggctgcactggttagattcggaatgtctgatgcattaaaggttgcagtaatctgcgtttccagatcaatgcgatcatccacaataacaacggttggatttttgagctccggaatcattcgcagtttctgtgctgcgaagaccataagaagagatttaccggaaccttgaaaatgccagattagacctttcttagggtagccagcgataacacgattcacaatcatattagcgccttcaaattgctggtaacgacagataattttatatttacgatattttttatcagtggcgaacatcgtgaagaactgaaaaatgtccatgacattcttcggtgaaatcatatcctccacactgatttttacatctgcaagactgccttccgacttatgagttgctgtgtgccacggtccccacatgttaataggcatattgatagaaccatagcgatagcatttgccttcagtagcaaaattaaatacgttggttacaaacatggcgggtatgcttttttcataagcagaaatatcgccagccgcatccaaccaagtaatggcactacgaaccggagttttcaattcaccgatagcaatcgggaagccgttaatcaagagcacaatatctaagcgcttgccgccttcggcctgaggatatatccactgattggtcacaacatattcgttgagagcaagatcttctttacgcatagtaccaaagaaacgaatcggaaccatgcgtccgtccttaccaaaaggataggagttttcctcgaaaatcattttcttgaaaatctcattctgagtgacaaggttatgtggttgaacagacaaaacaagtgtcctaagtttataaataacttcatctgcccgggatggatcttccgcaatttccgggttaaggcgaatgagggcctcttttaccattggttcaacaagtacatccgaatacatacgaggaagttcctcggcaggaatatatttccacccattcttctgaagagtagaaagcatcatttgctcaatggtattatcttcattaaaaatagtagccatctgtattcctcctccagtccaatcaatcttattttatcttttcgtccgtcccataatctggactatccggtaaaatttctaatatgtcatctactgtgcaattcagtttgaggcaaatccgtgcaattacttccatagaaactatttcgcctctgcccattttgcttatcgtgcttgggctcacatctgccaactcgcataattcctttttcatcatttttcgatcaataagcattttgaataatctattgtaggaaaccgccatatcataccgccttctttattcataccaacgcttgcaactataaaaactcatgataaaattatagcacactcgctttgctaagtaaattaataatggtgacttctcgcaagtgctgctcttctgcaagcagggctttcgtgacacgaaagcgattttctgcttgttggggaaactccccaatccccatagaacgctgcctgcggcatcgagctgcgcatccgttccggatgctttaacggcagttccttccatagaaaaagccagagcgaattatcaccccggcttcaaaaaacatttacttgtgcttgcggcctccacgctttttatagtcctcgtctatacgttttttccagtctgcactcagcggggcactgcaccggacagagctgattgcttcgctgaccacctcataattcaacgcggttccttcaccgtcgcactgatagttaactgcacgatctgcaccaattccgaactggcttgcggtctctactgcgtcaatattggcaccaaagaacaaaaactcccaaccatatttcgctttctgccgctcgatcatctgcttcactttttcgctgttgtaccggcggctggcattttccattccgtccgtagtgattacaaacatggtgtgttccggcacatcctccggtcttgcgtacttatgaacatttccaatgtgatgtatcgcaccgccgatggcatctaagagtgctgtgcatccgcgaaccgtgtaatcacggtcagtcatcagtcggatgtcccttacatttacacggtcatgcaggacttcgctcacattgtcaaacagcaccgttgagatcagtgcttcgccctctgcttttttctgctgctcaatcatggaattgaatccgccaatggtatcccgttccaatccgctcatggaaccgctgcggtctaagataaaaacgatctctgttaaattctttctcatatgcttatcctcccaaaagaaaatggctgctcggtttttgtaccttacagccatagtatagcgattttcttttgtggagtggtcgcatggaaagcgacatttctttgtccttatgctccgatcaggctctggtcaaaagcaaacagagcctcattgatttcatacacattgtagtttccccgttcgacaaaatattctacaatgatatcgaatttgctcgaatgggaaagggtaagccctgccttgccgagcatctcctgcatctggacaagcggcagttccaaagccagggcaaatgccagcaccgtaggtttggatggcttatagaatttatccgaacggatcttcgagaagagtttccggtcaatgtttgccttcttgtaacactgggcatccgtcatgccgctttcgtcaatcttccgcagcagcatttccgaaaagctctcatcaatctgtcccagtgcctcttccaaggattgactgctgcaagatttacagattgcttcggacggcagcgggacaggtgcagcttcaaagcaggattcctctgacaacgcttcgagccgccgtctctgttctactcggctgtcggtatgttcatccacataccggtcatctatgtacgccgcgatatcagcaaaaagttttccgctaatctgatatgccttccgatcaaagataacaatgtagaccatcatctcattctccagcaggaatgtgctgatggtatcgactgcaaccttcagagcctggtctttcggatagccataaatgccggaggaaatcagcggaaatgccaccgactgacagccattttcttttgccaagttcaacgatgtccgatagcaggattccagaagctcctgctcccgatgcttgccatcccgccagcgcgggccgactgcatggatcacatatttgcagggcagtcgatatccctttgtgatttttgcgttgccggtttcgcagccatgcagcgtactgcattctgcaagcagctccggtccggcggcacgatgaatgcagccgtccacaccgcctccgcccaaaagagacgtgttagccgcattgacgattgcatcaacgctcatttttgtaatatcgttcctaataatctgtaagggcacgaagcatacctcccattcatcaatttaactttctatctgtattataacttcttttatgttgagatacaaaattcaagtcaagagcaatcaataagcaacatcatcataaatattttttcacacaaaaaagcccggtgcagcatgagcattacacccacactgcaccggacaatccatcatcgactactctgtctattttcttcttcctgccgcacttcctgctcatgcatctgctcttttttctgctcgtcctcttttaggatttcctgcacaatcttctgtgccacaagccaatcctgcatttccgatttggtcttgcggtactctgcataggagcttttctttcgttccagaagcattgcatactctgcgttcagctcgctgatgcgcgggagctttttgtcagaaccgttctctttcttataggcatcaaacgcttttttcgctgcgctgcgtaaggccagcgtatcccgatgggcttcatagaattcccgattgtaaccggatgctttatacgcggcaaaaacatcttttgtcttagcgtaattgattagatgcttccgcaacaccgacacttccgacatccgtgcctcatccgcctttacagattccagcaacgcatcgcatttttcagaaatcccatctgctttttctttcagctctgcatagctcttgattccatgctcttccatgaacatcatagcttttgccatctgcttcagattaaagacttttgcccagcgcgcatatcccgcgcctttgcccgcctgcattttggcacggacatcaatcaggaacgacagctccggcctctgatgtacctgtgccgaccgtgcgcttgtgcgttttttctctgcaaatttgcttttgtgaaccgcatttccagcaatcacttcacagagttcttcaaccgaatatcctttgccaagagagcggaaacgagcaaatctggcatggcctttcccccgcatggcaggctgttttccgtctttatactcgtaccctgcttcctgcaaaattctaatcaattctcggaagtcttttggttttcttgccaatgctgcatcaatggcctcgcagatttcatcccgctgcgattttttctccggatattccgttctcttctgccgctctccatagggcttccggataatgaccgacaaccggtgttccagacagacgatatcactgagcctcgccagcgcaagtccggacagatgaaaatcgcgaaattttctggtgcaatctaatgtagtcgaattaaaaataatgtggttatgaatgtgcgcacgatcaacatgggtagccacgataaacgcgtgttttccctttgtgaatcgcatggctgtctcatacccaaccttgttcgcctcctccggcgtgatttctccgggcttaaaggattgccgaatctgatatgcaatcacatcatgcgcctgggttcttcccgtgatatgctcatactgccgtttggaaagcagaaattcttcatcacaggtctttgcatcacaggcatacgcactaatgtattttccatcttccgtctttgctgcattctcagaataatcagtacggtcagccagacactgcgctaccgtctttcctttattgatatgcagcgcaattagtcttgtagccgccattccttattcctccatctaaaaagagctacccgaaggcagctcttaccaattcactattctcattttaacatctgttcccggtcataagctccctgcaaataaatggcctgcttgatgatctcttccatatcgaaatagacacacatgatgctttcgtacagcttccacacattagattcgctgcctcccaccatctccatcagctggtcttccatcttcgattgctcagactgtttttcctgataagctgcctcatccacaaaatgattctctccatctgtttcctcataccgcaaatcataataatctttcataaactgaatatccatctaatccctcctgaactcaaattgtcaaaacatcctctacacactcgcacagccgttccatcagttccatgatgccgcccgcaccaaccgcagctgcgaacaaccccatctcaatcagggtcagcaggaacacatccgtccagctcgcccgaaccaccgaatagatgccgcagccaagaacgaacagcataaccggcgaaagcacccacagggatagctgcatcagcagattcccgataaagcacagaaatcgcagcagaaacgcaaccggaagcaacagaattttcagcaccagcttcatcaaaaaacatacgatcttcatggatttcaccccttcgtttttcttttcatcttcattttatcgtacccgcttgtcaaacaccacgatgtcaacaggaagacctgcaaaaaatatgtaatgacacagactgtttcatctgtgccatgtgcaatagaaattccgcacgtttgcgccgtcatcgaataccagaaagcctctttaagatcagcttttgcatctcccagagttcatccagtcgcttctgcaaatcccggatatcctccgcatagatgcttccagattcattggcgcgttttgcgtactggttcaggttgttgctgcatcggcgaagaagtgtggatacctgcgccacatccgacaaatcaagatttacgcagtacccgtccatcgccatttttctcatataggcaccggtattccgaatccccaattctttctgcttttcacgaatcctcgccagctcttccgggtttacccggacattgatccagtgttcccgaacactcacagtgccacctcctcatcatctcgatgtgtcaccggcggaatgcgaccggcacggtcacgcaactctgccaggacagacggcttttccgttgttctctcacgatcagcatcatcgtttccacggtcatccatattcagcagtgcgtccagttctgccagtcttgcactcttctctgccagttctgcctcctggggaaacggttttccaagctcggcctgcgccgcttcctgctggctcctgagattgtccaactgttgttccgccttttccagtcttgcaggaatcccagcaagagcattgtccagacgctggatattgcccgcagcactggtgccgatgggcacccggtgggtcatctcacctttcagcagcacctgatactctttctggaagctgtcaaacgtcagctccatcttgaaaccacggtagctgccaagcggcaccggctccagactctgattggctttacagaccgctaggattgcttcaccggcctcagctttttcagtaaattgtgtgccattcacctccataccgcagaacccctcttccggcagcggatgtgccgccaccgtccgaatatccgactgaaagcccttgatgaacccttgcgttttctcaatctccgcagggaaatatttcatcaatttatcttccaatcggtactgctggctctgatgatccgccttcaatactttcagccttgcaacatctacatccaagtccattttctccttgatttgcgggtctccggcacaaagtgccttgatctctgcataggaaagagcctgctcatctacatcatcacaggaacgtaccggagatttgctggtcatgatctggctgataaatttctgcttattctccagtgtctgatagaggtaggcatcaaaagttccttccgtcacatactgataaacctgcacttctttgtttcggtttccctgacggatgatacgaccatttcgctgggtcatgtccgcaggccgccagcccacatccagatgatgcacggccaccagcctgtcctgcacgttcgtgcctgcgcccattttctgtgtcgaacctaacaacacccgcacctgcccagtacggactttggcaaacagatctttcttttttgcctcggtatccgcatcatggataaatgcgatttcttcctccggtacaccggattgaataagtttggcgcggatatcctcatagacattaaaggttccatcgtttttcggtgtgctgaggtcgcagaacagcagctgggtcagcttgtccgactttccttcttcataaatacgaagcacattccgcacacaggcgttgagcttgctgttggggtcatccggcaggagtggattcatcagccgctgatccagtcccagctttctgccatccgatgtgattttcagcatgttatcgaccgacgggtctaccacaccggaatgcacagccgccgcccgttccgaaagctccgctaccatcgcctgctgatgctccgagggctgcaccaccacggtttcaaattttgcctccggcaccggcagatgcagctgatcggaagtcttgatatctgccacttccttgaacatattcatcagctccggcaggttgaagaattttgcaaatcttgttcttgcccggtatccggttccttccggtgccagctcaatggctgtggtggtctcaccaaaggtagaagcccagctgtcgaaatgggtcagccctttctgctgcaacgtgccgtactggagataccgcatcatggtgtaaagctccgtcatgctgttgctgaccggggtgccggtcgcaaaaatgatgccgcgcccgcctgtcagctcgtccatatattggcacttcataaacatatccgaagatttctgcgcttccgatgtggacaagcccgcaacattgcgcatttttgtgtagaggaacaggttcttgaacgcgtgtgcctcgtctacgaacagccggtctacgcccagctgctcaaaggtaatcacatcgtcttttcggtcggttgcccggagtttctccaatctcgcctccaatcctttccgggtcttttccatctgtttgatggagaaacgctcgccattctgggatttcatctcagcaatagcattttcgatttcatcaatctgggcagtcaaaatccgctcctgccgttctgcggacaccgggattttctcaaactgagaatgcccgatgataactgcatcgtaatcgccagtggcaattcgtgcgcagaacttttttctgcgggcagtctcaaagtcctttttgcttgccaccagcagttttgcactcggatacaggcgtaggaactcgtttgcccactgaagggtcaaatgattcggaacgacaaacatagatttctggcacagtcccagccgctttgcctccatagcagaagctgccatctcgaaggtcttaccggcacctacctcgtgggccagcagcgtattgccgccgtacagcacatgagcaatggcattctgctgatgttcacgcagccggatctccggattcatgccgccaaagcggatatgagaaccatcatactcacggggacgagtgctgttgaacagctcgttatacttttccacaagttccgcgcggcgataagggtctttccacacccagttctggaacgcatccttaatggcctgctgtttctgctgggcgagggtggtctcctttttattcagaacccgcttctgcttgccgtctgcatcctccacggtatcgtaaatacgaatatcccgcagattcagcgtatcctccagaattcggtaggcattggcacggctggtgccgtaggtcatataggcatgaacatcattccggctcggtgtactcttgccggtaatttgccattctgccgtcatgggagagaatttcacttcaatatttctgcgcagatagaacggcggttcaaaggtttcttccataaactgctggatataatcccgattgacccatgtggcaccaaggcgcacatcaatctccgacgcatccaggtctttcggctgtgctttcttcaaatattccgtgtttaccgcaaaggcagagtcagaagccgcagccagttctgccacgcggagtttttcccggacattgccggacagatattcatcagccgtcacccagccggtttcctcgccgccctgcgtcatcgggtctttgaaaatgacaccatgcagttcctgctggattttttcaaattctcccggtgtacctaaaagctccgacatatagggcaaatccactttgccgcgctctccgatggagattgccagagcctctgccggagtatctacgctggtaacagcccgttccggtcgaatcgtccgtttggtgaacatatccgccttggattccagcctgccgttttcatctacattttccagagagcagagcagataataagacgaatcttctgaaaaagcctgcgcatttgcacgggagttgataagcccatactgatcggcgaatcggtcataggctacattcagttcccgctgtttctgggcaatcgcgtcctccggataatcgttcagctgatagtcgatcagttcctgcacaatggtacgaagctccaccatgcccttgatcctgccggtggctgtcgcagaaaggtcagcctttcgcatgatgctgttctcacggaagtagacatccccatccaccaccgcataggagaagttctttacattggggtctgctggaatggtttcgccctgcaaggacagttcttcctccggtgccagctcctgcgcttcatagtgaccgccgatatgctgcacagcctcatgcagctggtctcccagatcctcatccggaatcggaatgaccgtacattcttccttgccgtactgggtactttccgttgtaatctcacccagcaccatttccgggtggtcaacaaaatagctgttgagggtaataccctccgatgtcagccccagatgcacccaatccggttcgatatcaattggatggtctctcttttgcagaaaaatgatatccgacactacatctgtaccggcattggcacggaatgcgttgttaggaagtcgaatggctcccagcagttctgcccgttgcgccagatactttcgcgcgtccggattcttggaatccatcgtgtagcggctggtaacaaaggccacgatgccaccgggacgaacctgatccaatgccttggcaaagaaatagttgtggatagaaaatccgagtttatcatagggcttatcgctgacacggtagttgccaaagggcacattgcccacggccagatcatagaagtcgcgccggtcggtggtttcaaagcctgccaccttgatttctgcctgcggatacaatttctgcgcaatgcgcccggtgatggaatccagttccacaccatacagtctgcttcccagcatggaatccggcagcataccgaagaagttgccgacacccatcgacggttccagaatattgcctttctcaaatcccataccgtccaatgcctcatagattgcacggatcacggtagggctggtgtaatgcgcattcagagtcgaagccctggctgcggcatattcttcttccgtaagagctgctttcagctccttatattcgcctgtccaggcagttttctctgcttcaaaggcatctgccagcccaccccagccgacataattggccagcgtttcctgttcctccggtgtcgcatccctatgctgattttctaaggctttcagcgtgtagatggcatccatgttggcacggaatttctgcttaggactgccttcgccgaggtgaaagctgttgatgcggtagttctccgcatgttttgcttcatgccctgcccggaacgcttctttttttccagaattcagatcaaccaccagattgtgcaggtgaacattttcctcatgccccaaaattcttgccagattttccttgctttccgagcggaagatcggatacacggaatccgggtcccgaagttccacatcgaaaagcccgactttttcaatcgtaaatgcctttccgtccagatacagcgtatcgccaacgcgataatccggctgcaccggagctgcgggttctggctgcacagttgcaggctctttttcagcctccatgttcctgccgcgaatctcctgcaacgcctctgatgcactcacataatcggcaaatgtctgcacttttccgtccgaatatccgtaatactcttctttgacatagtcccagatggcaaacgcatctttagaatccggaaagttcttgccggtcattgtgaccacaaaccgttcatccggtgcatagccagactctctggaaagttcgctggcgtgttcctgcatttccagtaccagaggatctgtctctgcgtgagccgattccgttacttcttcggattccacatctgggaatggaatgtcctgctgcaaattctgcttgctctgttcaacatagagccagtcttttgcttcccgttcctgaactttttcaatcaactgctggcggtaggtctctgcctcccattcgctggtaaactcttcgctgacaccatccggctccacatgaatgccgtcctgaatatcatcccagaccgcataaccatcgtctgtctccatcacggtaaaccgctgtggtgccgccagttcactccgggcatagacattcgcagccgtattcagcatgttgtccacatgctcatttccggtatcgtagcgttccggtggcgttggcggaaacacatgggcggcagtcggcataggaagcggcgcgccgtattcctgctccagcttccgatactcttccatttccagcgcggtcaggtactgatcattttccacaagccggtctaaccgcttatccaccgccgaccatgtgagtcgcacttcccggtcatggtcataattgcgaagcagaatacctcttccgttataatcggcaaaaccgcgactgccatccataaaggtatagctgtggccaccgagaccgtattccgctttcaagaatgcagctcgttcttttacgtccccttgctgctgatacagcgcataaatacggatctttccgccttcaaaattggagcctgtccgcagcatccggtcgatttcatcctcagaaatgacaaaagcggagggcttttcgctctccgcttctttggctgcattttctgccgccgcatcaattttctgaatctgctctgcttcggactgaaacagactcatgaagtttaactgttgataagttccgtcagaatgacttcctctgcctgcgctttcagcatgttcatgtgctgcacccaggccatctggttcaatttcttgtccggtgccggattcgctttcagaagatccgccatcatctgctccatccgtgcggtcgcggtctcctgaatctcccacaggtgcgggtacagcttctcggtcaggatcaggtgattgtacagcagcgtgttgttctcctgcagaaacgctctgcgcatcctcccgtacttgcccaggggcttctgttcctgcaccgacaactggatgtccggaatcaggtaatcgccgttcttcgtgtaattcagctccatcatagttttggctcctttctgcctgcttatctctttcataggttcggatcgtgcgttcaatttcccggaagatctggctggacatttcgctgaccgcagttcccagcacattggcggcagcctgcgtattaaaatcaaagatgtccagaaaatcctcgtgctcaaaatagtcatctgcattgcccaccgtccgggtaaagacggaatatgcgatgctgacagcggcagctctcttaaaggaagctccgatgttgagttcatcatatccttccagataggaatctgcaacgatgtcactgatctgcctgcggttttcctcccagtaatcccttgcaaggcgttctgccgcttccatgatatgattttccagagacccagcaccggcaggaacatcaaatgctgcatccagtgcgcgaatgattggctgctcatgctccgcattcattttccagagctgtaccggtcgggaattcttccgttctccggtatctgccacatcaaatacataccgcagtttcggctgctcgctgcgcatgtccaaaagagcaatgcccttggagccacgcttcacatagcggttcatccgatcattccagagatcgtactctgcacaggctgtcgcttctggtctctgcttatagatcatcagctgctccgcaaaaggatacttataaagccgtgcggatgtggtcagaaacgctgtccactgctctttgctaccagtgatctgtgccgcagcttcctgcgccatctgcatataataagccgttttcgtcatcatctattttttcctcctctcctttattcgtctggatacaaatcaagtgcctcatattctgcatccgtcatctctgccagttttgcaagcagcgaggccgtccacctgcgcaggtttctatctctgccggtcagacttttctgcatcatctgaagctctgcaatcagccctgtccgtgtgccagggctgtaaagcatcatgagcatccattcgtcatccgtaaaacgcatttataactccttttcttcgcagcacctacgaggcggcgcaggcggcaccgcctcctgcttttccttcagctgatccagaaccgatgctttctccgccggttcttccttctttccgttattgattacgccgtcaatcataccgtaatcgtcttccattgccatttctgcggctttcagataattctccggtttcaaaaatccgggcagctcctggaagccgatggaatccacatagtgacagcttacaacaccattctgccgtaaagccacgatgtcagacacagaaagactatgcccagtaaaatcatcagggcgggaaacattgaatttcgcatacagttcctccaacatcgtattctgatccttgtagggaagcagcggagccgtataaaccacttcataatggtcaatatccggttccagccccatccgttccagttcgcgcatagacgaaaagcgttcatataccgtatcctcgatgcggcgaagctgcaaaatcgcatactggtcggtagcgctgtcgagaaatgccatcattctttcgtccggtgcctgcgttccatgcacttcatcccatttttcaattcttgccatcgttcatttctcccttctccataaacggcaggccgttttcctttgcttcctgtcgctgctgttcccgccgcttttcactgtacggcggtcggataccaacacagcgtttcggaatcgtataagtgaccgacccatgctcccggtgctccaaaataaactgctccggatactgttttcgcagttcccggagcttcttaatcaggcggctgtcatgggtgtaaatactggcagtatccagttcattgtcaaaattgatgacggtttcctgctctaccttcgtaagcttatatttcatcgctccgcctccttcgccttagcagctttcaccggcgtatccgttctggaagacaaatccgagagtttacccagcacagattcccgtctgctgatttctgcatcctctgcacgatcacaaagttcgtcataatcaatccgcgtcatggtgcggccaccgaatccataatccgaaagaatctggtctctggctgcattcatgctgatttccgggttgtcgatctgtccgccgtcaatttccgtgaagtccttatgatataaggtatagtcgtaaccgtcctcacaggtttgaatggcgagaaagcccttgcttcccaaatcccatgcgctgcgttcttccgtaatcagcggctccggtcggcatgtaccgccaccgcgttccagcatttctgccagctggcagatgtgcagaacatcatacccaaggcgcagatgatattcgtccatatattcgcagcgggccgaaaacttccgattcggatacttgatctccaccgcgctgccatccggaattttgaaccgatcctcgtagctgctggtgataaaccggatatttttagcattctccagttcaggatcagcctttttcatctgccaaagaacctttctgccgccgcgcatctgctccagcatctccggggctaccggcgcaacggtaagaccgtccagccggggaatctccttgagtgctgccaccctcgcgctttcttcgagagtagaaaacggctgtttatccaacatatcccagccaatgtgtccctcggcaatctgcacctttctgtccatatcaaagcaatggaattccacgccctcctgcttttcctgcaaggaaagcagagcgacattatccaccagataagctgcattcatcattttcatgctcattttttacctccaaactccagcttaaatgctgctgcaccgtcctcgccggtctctacatgaacggttgtgtcatagtaacgtccagactttctggaatagcaatgggtaagccgtgcttttccctgatttaccagttgctttgccagttcctccgtcatctgctttcccagtgtctgaaaaaacctgttttccttccagagcgcaaatttacagcccttatccctgcaaaaccatccctttgccgtttcacagacatcactgccgcaggccgggcaggaaccaatgaccttgcgttccggctgcatcagtacatctgcaccttttacagcctcgtaggttttaacaagtccgctgaccatgctgctgatttctcccataaaggcatcactgtcatactcgccgtgttctattttcagcagtttttcctcccagtctgccgtcatggacggggactgaatctgttccggcaccaccgtcgccagcgcatttcccttgtccgtagagcaaaggtatttcgttttcttatcacccctacgctcgataaagcctttctgcaccagtttttcgatgatggcagcgcgtgtagctggtgtgccgatgccttttcgctctacaccagccggaaattcatccgagctggcactctccatcgctgaaagcagaagatcttcggtaaacctcttgggtgggctggtcttaccttctttcaaatcgacacgggcaagttccagtgtcatgccttccgaaagctccggcagttcacttgcccccgcattcttctcagcctcttcactcggctttcctgcatatcgtctccagcctatatccgtggctgttttgccttttgtacggaacttctgaccggcgcactccgcttctactacggtttctgcatagaggcaaggtgttccgactgcacaaatcagccgtacagccaacatggtaaggatcgcctgttctccactgggaagcgaggaaatgtcataactcgccgctgtttttgtagggataatggcatggtgatcggtgactttcttagaattgatgacctgcgctgcattcaccggtgccggtacatccgcctgaatctgaaagctctgctggatcacagaaacaagttccggcaccagcggtgccatatcatccgtcagataccggctgtcggtacggggataggttacgagtttcttctcgtacagagcctgtgtgtaatccagggtctgctgggcagtgaatcccagctgccgatttgcttctctctgaagcgatgtcagatcaaacaaggccgggggcttctctgatttttctttctgctctaccttggtaatgatggcacttcctgcctggcaacactctgccaccagtttttctgcttctgctttttctttcattcgctcaccgcccgcttgaaaatcccgaaattttaattctgccgagtagaacggctccggcttgaacgcccggattgctgcatctcgcataaccaccatcgcaagcgttggtgtcatcacgcgccccacattcagggtctgcccatacagacatgaaaaaagccgggtggcgttgattccgacaatccagtcggctcgctcccggcataaagccgcctcatataaggcatcatattctgttcccggtctgagcttctgaaagccttcccggatagcactgtcctccattgatgaaatccaaagccgttctaccggctttttgcagccgcactgatggtaaaccaatcggaaaatcagttctccctcacgccctgcatcggttgcacagatcaggctctctacatccttccgctgcatgagctttttcaggattccaaactgctttttcgtactggcagatacctgatactgccaatgttccggcaaaatcggaagatcatcatatctccacttggcatacttctcgtcataggcttccggctgggaaagttccaccagatgccccacacaccagctgacaaggtaaccattgccctccatataaccgtccccgcgctgatctgccccgatcactttcgagagactcatggcaaccgagggcttttccgctaatacaagcttcattcgatactgctcctttcgcaaaaaaattagcagccaggcaccgaagcgcatgactgctatgtaaggaacggtattctattttaggtctacaaactggaatttatagtcctctcaaaaccaatttgctttttcttctcgaaatacgggaatatcactatctcgatatggattgtaattatgaagattgcaaccaaactcttttaatgattttattttgttatcctgtgtccatacaattaaagatattccgtcaaattcttcaacatttccattattcattttgcttttaaaataccactccacgattgtttgattgccttgatgaaaaaattgcttaatctcccagacaagaacacttccgcgtgtattccattcgtcaaaccagtgctttaccgttttgcggttttcatatttaggactccaactctcagtatatacaacatcatctgtaaaaatattgtcaattcctaaatctgctttcttaatccacatatcaaaccataatcggataattttttctctctcgttcataaagtacctccacaaactccgagttgttgagctgttcttactttctattttatcagatatcgcctacagattccatagcttcatagctcaaaatagttcacccaccaaccatttggctatgtaaaggggacggcttttcagccgccccaccggtcaacgctgcgttaatcagacaggttcatcgtccgattccgcttcataatcctcgttgacatccacttcttcgtcctcgtcaccatcatcctccggcagctggagcgtatcttcatcctcatcgtgataatccgcatccgggtccggctgatttttcttggacgcaggctttacgcccttcatcttgatatagagataaccgccgacaccggcagcaccgatcacaaacagaagcagcataatcatcggaagcggagacgatttcttctgctcgctctctgttttctgctcttccggtgccggttccgtctcctgcggcttttcggtttccgcaggttccgtgacttccggctccttctcccgatacttggcagcttcctcttcatccatcagcgcaagcagatcggcctcgtccaccatgttcaggaaatgcacattctggttgccgtctttatcgcggtcgatgatcagataaaaggtgttgcccgcctttgtcaccagcgtaatgaactgctggctggatttatcttcttcctcaccgatatcgtccaccagcgtcatatttccttccggagtcaaagctgcactggatttcgtctcatcctcgtatgacattccactctgcatcagatccagaaacagcttcagcgcatcttcactgaacatgctgctgtcttttgcagaatccgtgacattcaggtactttccatgtgcatacccggttttgccgttgaagtttaccttataccagtcaccgcatttttcgacaatctccaccgtatcgccggaatgcagatatccgataatctcctgatccatgccgggaccggaacgaaaatgcagactggtgatccccggcaccaccgtaccagtctgcttttgggacttttcgctgccgatattgtattctttgccgcccaccgtaacgatcaggttcccatccgcatccgtagagacctcatagccatccggcagaacctgcatgtccgggtcgatttcgatgctgtcggtattgtccgttttccccgcatttgtgctttctgctgcatccgtctcctgtgcagcggtactgacaggcgtgttcttctgcacatcatcgcccgtataggcaaatgcagtggtcgtaaaggttcctgccgccatcacgctggcaagcagcattgccatcatctttttcattccatatcctccgtttctttctcatccagtttcaggttctccgggttgggaaccgcagcctgcgccagctgaatgatgactgccagctgttccggggtcaagctctgggcatgtaccatttcacagatttcgctgttttcctgctcgtggtactttctgtcccattcctttctgcgctcctcccattcatcgcgtttcctgcgggctttctcgcgctccgcagcaatcttttccagtttcaagctcatatcgtatcctttccgggcgaataaacgccctatttttatcgaattcttcccatgcagtagtagtgctgccgccagtagctcgtctcaatggaagcataggaaattggtgagccacagtggatcatcatcccgttgccgacataaatgcccacatgggatgcgccgctggtgttgtaggttttctggaagaagatcaggtctccgggctttgcttcactcttcgggataatgtcgcattttcccatcagaccattggccgtctgtctgcctacattccagccattcccgcagtgattgatgacccagcttacaaaaccggaacaatcaaaactggtgctcggtgaactgccgccccaaacatagggatagccgagatatttctctgcttcggtaatcatcttccggaatttttcatccgtcagtgcttcgcccggaatatcgtaatcctgatattctccgctggaacctgcgccatccggcgttgcaaaggcaatgcctgcaaacagatcatccctattgccccggcactccaatgtgacttcgtagcgttgcagctggtcatctgtgaggccggaatttctggcaacatagtccacaccccgattgagcagcgttacattgaggattttatactcatactgtaccgtcacttgataggtgtaggtgtgtccggttccggtgatcggattatagcgatagcccacacgggtttctttccttgtccggatttctaccttttcttccaacttcagctcatactgcgcttcaaaaatactctggagccgtgcctgcacctggcttctcgtatagttttcaaattctacggtcagcagagaagcaagctcatagggattgtgaccgatttccgccaaattgtagcgatactcgtcatagcccggatggtcggtttcaatgcggtcgatttgtttgcgaagtttatcttccagcttggtataatccgtctccacgcctttcaaatcttcatcttccgctgtataggaagtccccagcaccacattgccgccgccattgatcaagacagagcaggacgataccgacccggcaatcaccaaaacaagcagtcccacggctgcaatcccgatgatgatatgcgagtggctctgcacaaactgaaacgccttttccgtcatgctggcagtaccctgcgcagctttggccgtgccagctgctgtgttctccgctgcggctgcacctgccttcgcagcggcatactcttttttgatagcctgcttctgccgccatctggaaaagaaattcgagccagcctgcggatcagacttcatgcgttccgcaaagatggaatccacggcatctttatctgcctttttctccaaccgctccagctttttgtactgccgcagctttcgaccatattggaaccgggaaccggcacgggctgcaccttccgctgaaccttcggaaaaatgcgctgcctccacaccggaattattatcctggtcggcattgcgcacactctgatgtgctttggctgaaatcgcatctgccgcaagattccccggcttctttggcttaccgccctttttcccggaagccgcttcattcttcttcgcctttacctcctgctccgatttcagcttcttactgcacatcttggcaagatcggcctcgtgacgaatctgccttcggtgttccgcttttttcttgctgctgtctcccgtactgctgtctgcggtcttgcttctggaatcgcgaagggtgttttccgcaccctcgcgctcctgccgcagcttgtctccgagattcggatttttcttgccagccatcgcttacgcctccttcgcttcctgcacttcggttaattttgtcgtcataatccggtacagttccagatcggtcgggaaacgatcaacgaacggcaaaatcacatttccgtagaacagcagtccttcgccttcaccggagtgggtcacataggacagctgatgtgggctgatattcagctgatccgccaaaatctgacgatcaccggctgcttgattcagcatataaatgaagtcgctgttctcaaaaatgttcgtcacttcgcgggaagaaagcaggtctttcacgttctgggtgatgccggtgggaataccaccccatttacggaatcgcttccagatttccacgctgtaagccgctgtctgctcttctttcaaaagcagatggaactcgtccatatagtagcgggtggctttaccggcattgcggttggcggttacacgcccccagacctgatcctgcaccaccagcataccgatctttttcagctgcttgcccagctccttgatgtcatagcagaccagccggttattgatatctacgttggtgcggtggttaaacaggttcagcgaaccggtcacatagatttccagtgccgttgccacatggtgtgcttccttttcatcctgccggagcagtgcctcgtacaagtcctgcaacaccggcatgttctccggcaccggattctcaaaataggtctggtaaatctgatgaacacatcggtcgatgaccgtcttttctaccggctgcaagccttcttttccgcccacgatcagctcacacagggacaggatgaaatctgctttcaaggcaatcggattatcctcttccgaatagttcgcattgatgtccatcgggttgatatactgcgtgctggaagggctgattttaatgacctgcccctcaaatttcttcaccagtgccgtgtactcggcttcaggatcgcacacaattacatcgtcatccgtcaccaggaacgcattggcgatttcacgcttggcagaaaaggatttaccggaaccgggagtaccaagaatcagcccgttggggtttttgagctttttccggtcaaccataatcaggttgttggacagagcattcagcccatagtacagagcctctttcccggtctgaaacagttcctgggtggtaaacggaacgaaaattgccgtgctgctggtagtcatgctgcgctgaatctcaatcaggttctgtgccagcggcagacagctcatcagcccctgctcctgctgaaagtccagacggcgcaggttgcagttgtacttctgcgcgatactggaagcttgaaacacattggtttccagctcctgctccgtctcgccggtgttcatcaccagaaaggtcagcaggaacatacgctcattctggctctgcaattccttcagcagtgcctttgcgtccttgccgtaagttgccaaatctgacggaatgatgtccatatcgtatccggaacggacagctttcttctgttcctcaatcttggaacgatccagctccgtaatggtgtgcttgatggatttgattgctttattctggtctaccgactgaatgtgcatagtcacgatctggctggattccatatccagaaaatccttcagcagctgatccgacaggtcggaagccgtgatctggagataggacatggagccatacatcccgcccatctgaaaaatacggttcttcggaaaggcaaaaccggtcggtgcaataaagtcctttaccgacagcccgctctccggcaaccacttccaatcgaaattgaatcggtcatggtcacccatgtggaacatatcgtgcatcagatgaagccgttccttgccgttcagcaattttgcccggacacccaagcgtttgaagttgttcatcaggtcgatctcgatgtgaatgagcctcggctttgcctgtttcatggattccgcctcaatgccaaacgtcaggtacttcgtcttggtcaggccgttgttgccctgggcaagctggcggcgcagcatggtgctgtactccgtgcgcaccggattgaaatgatccttctggtacgggatacgcaccatcttctcaaaattcgaggcatccgtagccatattcataaaagaaagctcaaagcggatgctggaatcaaagaagttcaggaagctgcaccattcctcaaagatagccgtctgatcctcctgctgtgccagctggtaattgatgtcctgaaactgaatggttttggtgtagtagttgtccgtcacacggcagataccatccgggaacatccgctgaaagggaatgctatcctgagctgagtgcggaaccgtgctgtcaccccttgcacggtcaatcaccgtctgcacctgtttttgctctgcggctgacagatgggacggcattcggatgtcatcctgctttttattcttcgctgtcagcttttcgagaattttgaacaatgcgatttacctccatttccacgtctgcctgctgaaccagcagtgcatagtaattttttgttttgtaaggccgcgttttcggcctcttgaactttgcctcatagaagtgctttgccaccacttccagcggctgaccgtctttctcatacatggcaagaaagaaaagcggcagcatcaccgccatcatgccaagtgcggcaaggctcagattcccgctggatttgagtaaaaagaaaaccggaacgccaatcagcgcaccggctccgaagcagagaatctgccgtttggtcaggttcataaagaccttggtcttgacctttgaaaggtctcgcggcacagaaatataagatgccatgactcattcctcctctcttagtgcgctgcaaacacggatttcgcgaggcttcccgtcttaaacaacgtaaatgccagcaaaaccgtatagcccataacgccccaaatgctgctgataatgttatccgaaaaggacaggttctgaatcagaactgcatagatgcctacacagatcatgataagaaagccctggaatcccagtgcaaacagggagcgtagatagttttgaccggtgtggctctgctcatggtttccaaaggttgcgaacggaatcggcgcaaggcttaccatgagatatatttccaccattcggccatacacgataacaaagataatagccgacaatgccagcatcgtgacctgaaccacaaatgtctgcaaatacagtcccagcagcggtcccaagtccatgccttccagtgtggcctgcatcgctgtcagggtcgcatcgctgacggacgtactgccggaaatcagaccgccgcttcgggagatcacttgctgcgccacatcaaagacagccatcgtgatattgaatgtgttcgagatcagggtcactgccagaaaggtcttaaagacccatttgaaaaatgtccaggtctcgaaatttgccagattgttatgctcgatgagcatctggatcagctcataacaggcgatgaatgtcagcaccattccggcaatgggcaggatcacggattccgagatgttgcggatcatagaaaaaaccgcaggtgaaaagttcgccggtgtggttcccacatctcctgcgatctgtccaacctgctggttgaccgaatcgaacatccctgaaagatttcccatgataccgctgatgatcatgctcttgagccaatctgtgatctgttcaaggatactctgcatgagccgcctccttccttacgcgaacacgccgaacagcttcgccatccgggacagaagcataaacagctgtgagaaaagagacagtgccgatgcagttgtagtaagaaacgccatagatttgtcctcctgtaacttgtccggcctatcagccggtgcgattctaaactgcggttctgcgccatacttccaacatgtgcacctgccagagagcgcagaacatagccagctgcggagattgcctgcacctgactatgtaacaggcagctttcgccgcccggtcggaatcttcgccccgacagcctttgcttaaccgaacagatcggaaagcagcggcaccagagtcgtgccgatcagtgctacaccgccaccggccatcagctgcttcatgccctgagactttattaatgtgtgataaagaagcaatagaagtgtaaaaaattttgccgttcctatccggcacttgcgcattgtgtcggataggtcgaagggtttgcagagaatttaataacaaaatataacagttattaaattccctaaaacaggtgaaatctcaatcggaatttggcaaggagttttgatagcatgaaaaagagatttcttaaaattgtgatagggattgttttagtttgcattttattcgttggatttctttatgcaaacaataacatcggtatgacttcgaccaatttggaaacggatattcgttcatcgcagaagattaaagatgattggacgctcgatggaagcgtttctaacacgatggctgcttatatttcttattctcaagacatgagcgaccacactttttccgtctatgtcaatcgtccaggactttccttcggatattttttccgtggaggtggaactctttcggggattcaaagaggaattgtggagtttactgtagagggatataatgaacgagcatttatttctatgaatcaacagcaggtgcaacaacttgaaatagatgatggcaacacaattcaagtggttgatattgaccgcaataaaccttttgcgattgtcttgcctataaatgcgggtaatattactttttatgatgtaaatagaaatactgtggaatattggaataatcctctttgacaaattcaagtttggagaattgagaaaatcggaattgaccgagctctttgagcgagggatacttcttgtccgaagggcaagaaggtgggcgtaaaaaagattagaacaatcgggatttgaggaggtgttcatatgaagagagcattgctttttattttcatgacggtttgtgtattaggaatgtccgcctgcagcagcaaagacgccatgccagaaacatcagattctgccagcaatccggttcagaatacagatatcagtaatctgaatggaggaaaaatctggtctgaacaagatattgtgtcgatgttctctcttgtgcaagaaacagattgggaatacatagactgtgttttaattccagatcatgctagtgaccgtgttggtgcagtactcttccggaacgataaggagcaaacaagcaatgttgcgttctttgatgcagacggatactttcaacagtatggcacatatgcaagaatgtctgacgaacctgattttcagtatctcggaggtggtgcggtaacatttaggctggaaacagaagatggtataatctataactacacgatcacaatctcgatcgatgacagtaatgtgaattttaaagcggaagatgatttgccaaaataaattcaagtttgtcagcttcacatcgggtcaacttgccccgaacttttacaattaaatacccgccgcccacatagcggcacaccgagcaggaaatctgaaaaaggtctcctgcttttttctgcccaaaatgaggtggtaaaacgccaccccgtccaccaattagcgaaaggagggacacgaaatgccctgtccacacaacgaaatcacgattgttcagcgcagccagcggcagtctgcggttgccgccgctgcttaccagagtggcgaaaaactgttctgtgaatatgaccagcaagtgaagcactacccggaaaagcgtggtatcgtccacaatgaaatcctgctcccacctaatgccccacaggaatatgcagaccgcaatactttgtggaacgccgccgaagcggtggaaaaacaatggaactcccagcttgcaaggcggtgggtgcttaccatccccagagacgacctatccgacacaatgcgcaagtgccggataggaacggcaaaattttttacacttctattgcttctttatcacacatcaataaaatcgcagggtatgaagcagctcatggctaattagatgtaataaaagcggagaaaggaaaagcacaatccagacggaaccggcggtgtagtcaagaaatattgtggaaacgcaagatttctgctataatgggtataaaacacttgacgatggaaagaaaggcgggaagcctatgcacattagttatcagccactatggaacacactgaaagagcgtggcatgaggaaagaggatttgcggcttgccgccggtcttaccacaaatatgattgccaacatgggcaagggaaagaatatcagcatggaaacgctggttcgcatttgtgaagccttgaattgtggtattatgaatgtgattaaattagaacaggacaatatctaaagcgatataattttatatttgattcgatttgcacaaaaaattaaattttaatggtgtatattttctattgtacccaatgtaaataagtgctatcataaaataaaacaagtacatttgaaacattttatgatttgagagtgtgcttgcaggttattagcatattgccaataactgaatacaaaaaatgtaggttctggtcattttagaaaggagcattgtttatgaaaaaatttagtaaaagattgtttacctcgttggtagcgttttgtatgcttttttctgtgagtgcggttcctgcttttgcagcggaaacaacaacggaaataacggatactcaacagccggtagtcattggagaatatgacggatacttaaccgatgttatgatttccgatggtgtcaccaaaagagcagtcgctaatgttcgtattaactcttatgcaacttatgatgaggatgatgggattcaagttcatgtgaagttgtatgtaccgtggtatgaatctccaaaaccggagttcactggtatgactggtacagttaatgtgcttatgaacaaaaaatccaccaatacggcatttgcagaattagccgacggtgaagaaacaatcgaaactgatgtggatactggaagaacaggtaatagcggagataagggaacggtttctgtttctggtgttgctaccgctaataatgccttggcaggcggtggagctttcgctatttcttaccctgtgacacttccctaattaaatgcaaaacagttgtgaattaaggttggtaataggtaaaatgaaacggttattggcaatatgcgtatgtttttttatgtgtgtaggcttatgttcgtgtgattcttcccaaactcggtcggtatcatcatataactggtctttagaatttattactgatttagatggtaatatgttattctcaggttcagtgcatgatgacataccagtattggatttgacattgagttttgaagaaaaaagttttatcttaacagataacactcataaacaagaatggacaggtacatattcgcttgaaaagattgacaattcttcttcgaaactcggattaacttttgaaaatttagaggagcctgttacaggcgtatatggaacaagagtttattctgatgattcagaaagcgcaacaattacattacaaactgatgaaaatatcctgtcttttgttggagaagattcataaataaaaacagccgctgtaggaacaaaatcctacaacggctgtttttatttccacggcctgcgccggaagttcataccagactgttttatcagcggggatttcttgaacagctttttcaaaaggcttcgttcctcttgtgagagccgcttgtatttgagccggaacgccttgcagaatatctccgtgaattgctgaaccctgtcccccggagattgcatggccttttgtacttcccgtataagttcatcggcaggcgtggtatccggcgcactttcgctgtcattttcgtgcgccttgcgtatatcatggagaatgacgtcccatgttttgtgcgtcacatggcagaaaaaatcttcttcctctatctgacaggcttccaacactttgattgcccggtctgccgcagcttcggggtgttcttccagtaccatagcccgtaaagcagccagtgagctgtttgtgtcatggaagtgcatggttgctatcccgtccacatagatttctgcgtctgccagcaattccttaaatttttcatgggagataatctcacacagcagccggttattgaagcgttcacttttcagcagttccacgacttcatcactcaaatgtaattcttctatcggggtgttttcatatctccgattattggtaaggccgagcagatagtcaaccgacacctgatagaagtctgccagcttcaacaggctgccgtggttaatttccttgtattcgtcgttgtcgttttcataactgccgagggctgattttgaaatgccggtttcctgtgccagttcttccagattcaagccccgttccacccgtaaatctttcaggcgttcctgtacggaaatgcgggttttcataaacacatcgctccttcctgcggctggctgccgctgttattccttattataccataccgttccgaaatcgtggaaattttcgattttggggcggtattcctactttctggacatacgggaaagggttcaaaaatgagctatgattaagtcagttcatcgatggattattccaatcgaatgaccggcctgatgggatatgctccccggcgatgtagcgcaacgacctgcggcaaggaaatggaggaaccttgaccgcagcgagcgtaccaacgggaacgaaacgccgctgtgagattcaggggcaggaacgacagcaggacaacccggcagaactgataccaaaacgctacccaaacacgacaaatcggcggggtgtagtctgccccgtccgtaatactatggggcatttcaaagcggctctatggccgtattttccttgaaaatcgccccgaaacatgacaccaaaaacctttatccgcctgttcccgttgttacggctgaaatgggcggattttctatgataggaggcactatgccgagaatgagcaagaaacggaagttggagctttccttcttcctcaatgaccgggggcgtgtggcctacaacgacctgtgccggaagtgccagcataagtgcaagcagagtttccgggctgtcgtgatagactgcccccattacctgtcaaaacgagccaagcgaaaggagaaaatcagttaaatggaatttgaatttatgagcgcagacacggttctgccgccttgtatgccgctacccgccgcaatgcttcggctgccgatcagcagcacagcaaaagtcatgtatgcccgtctgctgaacaccacccttacggcagggatagaggatagcaacggcattttgtttgtccgttttcctatcatggaattagcggcagccctctcccgcagccccgtcactgtgaagcgttccctgaaagaattggaggacatcgggcttatcctgcgggtgcgccggggtgtgggagaaccaaaccgcatttacacgctgcttcccaaaggagggctgccatgataaatgagaagctggaaaagctgaatcaggagattgccaaaggcgaagccagactgcggcgggcgcagcatgaagaaaaaatactggaacaccaggtgaagcagcttacccggaaggaacggacgcaccggctctgtaccagaggagctatgctggaaagtttccttttaaggccggaagtgctgacagacgaggatgtgatggacattctgaaacaggcattttctcaaagtggcatgaaggaaatagttgcagaaagcgtgaaagggcgggtagccggggaatcccttacggagtaagggcgcaactatacaccggtcgagccggtgcgttgcgccctgccgggggcttcctgcggaaagcggatgatttccagcacacttgcggttgcttccaatcatcacaggggacgctatgcttcccctgcgctggctgcgccagctacccttttgtggacttgccgcccggaaacaccttgcactgcaagatgttcccgtccgacaagttttacaaaatccagctatacatttccggataaatgaaatataatgaagtcagtgacaaattcctttttgtggaggtgttcgaatggcttatgaattagaaaatatagtccgagagtggatggatcatcttaaaggcttgaatgtagaagtgaaaaagatgtttggctgctattgcctgtactgtgatggacaggcggtcggatggattcacaatagtgttatgagcttgcgagaagtcggactggattatttgccgaaagacataaaaaggccgaccaaggaagataaaatccaagagttggtaattcccttggattatgcaaatgctgattggcttccgaaagcggttcaagatacggctgctatacgaaaaaggaatggatgactttcggcttgattaactggaaaactttcactttgtctgactgataaaccaccgaaaaatgaatacccgccgtccactggcggcaccaccgagcaggaaatcagaaacggtttcctgcttttcttttgcccaaaatgaggtggcaaaccaccaccccatccaatcacccacaggaaggaggaagccgttatgctctgtccccaccatgatataaaaatcgttcagcgcagcaaccgccagtcagccgtagccgccgcagcttatcagagcggcgaacggttgttttccgagtacgaccagaagcagaaatactatgcagagaaacgagggatcgtccacacagaaatcatgctgccgccccacgccccgccggagtacgcagaccgcaacaccttgtggaacgccgccgaagccgtagaaaaacaatggaactcccagcttgcccgaaggatcgtacttgccataccgagggaaatcccccggtcacagcacgccggcctgatccgggactattgccgggagttttttgtttccaaaggcatgattgccgattttgccattcacgacaagggggacgggaatccccatgcccacatcctgctgaccatccgggcaatggacgaaaccgggaaatggcttcccaagagccggaaggtttatgaccttgacgagaacggcgagcgtatccggctcccgtccgggaactggaaaagccacaaggaggacaccgtggactggaacgaccagaagtacggcgagatatggcggcaaggctgggcggctacggcaaaccgctatctggaagccaatgaccgcccggagcgccttgaccttcgttcctatgagcgacaggggcttgataaaatccccactgtccacatggggccagcggtcagccagatggagaaaagagggatacagaccaacatcggcaacttgaaccgggacattaccgccgccaaccggctcatgcagtcgatccgtcagatggtgcgccacctgaaaggctggattgcagacctgaaggagaaaaaggccaccctgctggaagccttgcaggaagcgaaggaacccaccctgccggagctgctgggccaatatctggatttgcgccgggaggagcgcaccggctggacgagcaaaggccagctcaaaggcactgtgaacgacttcaacaaggttatggtcgccatccgctatctgcgggaaaaggagctgtccaccgtggagagtttggacgcctatctggataccgtcagcggacaggccgtttccatccgggcagagatgaagccgaaggaaaaacgcatgaaggaggtcgacaccatgctttcccatatcgccaactttgaagcccacaagccggttcatgcggaatatgccgctattcggtttaagaaaccaaaggaacagtttgcagccgcccatcgggacgagctggacgcctacaatgccgctgtccgctatttcaaggtgcatttggagggaaccaagtacagcaccaaaaagctgaatgaggaacggacgcagcttgccggagaggtggccgagtataaggaacgcctgtcagcggtgcaggaggatgtgaagattctccgggatgtgcgccactggctcaatcaggtgcttccgtccgagcagtaccgccagaccgccgagccgggcaagaaaccatccatccagcaggcagtcaaaggccgggcacagcgtatccgggaggaacaggccgagaaacgccagcaatcccgcacagagaaaaaacaggatatggaactttaacaggcgcttgccattttcttttcgagaatgacaggcgcttttcttattttcaggaggatttagttgaatgtatttgaagctgtcaagcagtttgttaccacccggcaggctgccgagcatttcggaatccgggtgggacgaaacgggatgtgcgtctgtcccttccatgccgacaaaaacccaagcatgaaggttgaccggcgctttcactgtttcggctgtcaggcagacggggatgtgatcgactttgtttcccgtctggaagctgtcagcccaaaggaagccgcccttatactggcacaggcgttttccatcccctatgaggacaaggagccgtccagccacaggaaaccaccgcaggaaaccccggaacagcggttccgccgtatggagcgttactgcttccgggtgctgtgcgattaccgaaacctgctgcgccgctggaaacgggactatgcccccaagacaccagacgaggatttccacccgctgtttgtggaagccctgcaaaagcaggactatgtggactatctgctggatgtgctgctctccccggatatggaggaacgggcagcctttatcatcgactgtggaaaggaagtgagcaatcttgaaagacgaatggcagagcttgccgccggagatacggcaggccgcagaacagaccatgcaagaagcaccgccaccccggagcgttgaggaagtcaaagccatgctggaaagcaccgagaaaggcggcgtccgcaacagtatccgcaactgcctgaccgtctttcagaatgacccgctgctttccggggcaatcgccaaaaatctgctgaccgagcgcaccgacatcatcaagcccatcggataccaccgtaccggcaccgccatcacggacacggatatgaattatctgctcctgtatctggaagaaacttatggactgaccagcgaaaagaagattgccgccgccatcgggatcgttgccaacgaaaacggctatcaccccatccgggactacctgaacggcctgacctgggacggaaccgagcgtatccgtacctgtctgcaccactttttaggagccgacagcgaccagtacacctatgaagccctgcggctgttcctgctgggagccatccaccgggcatttcatcccggctgcaagtttgaggtcatgctctgtctggtgggcggtcagggagccggaaaatccacctttttccggctgctggccgtgaaagacgagtggttttccgatgaccttcgcaagctggacgatgacaatgtgtaccgcaagctgcaaggccattggattatcgagatgtcggagatgatcgccaccgcaaacgccaagagcattgaggaaatcaagtcttttttgagccgacagaaggaggtctataaaatcccatacgaaacccacccggaggacagactgcggcaatgcgtgttcggaggaacttccaacgccctggacttcctgccccttgaccgttccggcaaccggcgctttctgccagtcatggtgtacccggaacaggcggaagttcatattttggacgatgaagccgcttccagagcctacatggagcagctatgggcggaagccatgaccatttaccgcagcggggattttaagctgtctttcagccccgaaatggcgcgttatctcaaagagcaccagcgggattttatgccggaggacaccaaggccgggatgatccaagcctaccttgaccgctataccggcagcatggtgtgttccaagcagcttttcagggaagccctcaaccacccctttgacgagccgaagcaatgggaaatccgggaggtcaacgacattatgaaccactgtgtcacaggctggcactacttttccaatccccggatgttccccgaatacggcaggcagaaaggctgggagcgtgaagccccggcaacggataccagcaacggagccgaaaaaatcccggagggatttgtggaggtcacagagcagatggagcttcctttctgaaaatcccgccccgttgccgactttgttgcactcccgttgccgggctggttgccggggaaagccccgtaactgcgggctttttcccctatcagcaaccaaagcaacagaaaaataaaagaaaatataaattgtaaccaaaccgccagacagagatggttttgaggttttttgaagcccgttgccggacttcgttgccgaccttctccttgtctggctattctattatggaggataactgcctatggcaaaaacgaaaacagagattcatgttaccacagtttttgacggcgagctggacgcagcggatgtctttgtgagcctgattgcccaaaaatatgggcagaataccggcaaggataatcttgcgaaaacacaagatttaggatataataaagacgaggttcagaaaaaccgtgttccgtctggattgtgcgggtaaacggttatgatgaacggatacgaatacacaggcatggacgcaattctggcgggcagcttccgggcggccatctattgcaggctttccaaagacgatgaccttgacggggagagcgccagtattgccaaccagcgggatatgctggaaagctactgcgaaaagcagggatgggaggttgtggcagtctatcaggacgatggctacacggggctgaacatggagcgccccgacctgaaacggatgttaaaggccatcgagcgcaggcagataaatcttgtgataacaaaagatttatcaaggttgggtcgaaattacttgcagaccggcacactgatcgaagacttcttccccaggcacggcgtccgctatatcgccatgaatgacggtatcgacaccatgcgggacaacaacgacattgcgccgttcaagaacatcctgaacgagatgtacagcaaggatatttccaagaaggtacattcctcgtatcttctgaaagcccagcaaggccagtttaccggctgtgtggctccctttgggtatcggaaagacccggaggacaaaaaccacctgctggtggacgaggaaaccgcccccattgtccggcaaatcttcctttgggcgctggaaggacacggccccaacttcatccggcgcaggctggaagaacagaaggtgccttgccctacatggtggaaccgggaacggggcttccgcaatgtccgcaccaaatgggagaagaaagacccggaaaacgggcggtatatgtgggacttctccgtgataaaggacatcctgatgaatcccgtttatactggggcgatagcttcccaaaagaaagactaccgcttcaaaatcggcaccattggcgagaagaagccgcaggactggattgtggtggaggaacggcacgagccgttgattgacagcaaaagttttgccatcgtgcaggacaagctgaaatcccgccagcgcccccggcaagacggggaaaccagcctgtttgccgggcttatcaagtgcggcgagtgcggcaagtcactgaccatccgcaccacccacgccaagcacccgcagcagatttacgcctgtaagacctatggtgcgttcggcaagaaccattgcacccagcaccgggtggaatacgataccctttaccaccttgtcctgaacaaaatccgggagtgcgccaaggctgccctgaccgatggggaagccattgccgggaaactgaccaacacctgtgaagccgagcagaaaggccagcgggaagcgttggagcgttccctgacaaaagacgaggaacggattgaggtactggaaaagatggtgctgcggctctatgaggatatggttgccgggcggatcagcgaagccaacttcaatctcatgctggacaagacgcagaaggaacaggccgaactgaaagaacgggttgcacaggggcgcaagaagctggctgatgaaatgcggctggcgatggacgccaaacaatgggtggacgccattcaggaatatgccgacatcacggagttggacgccgccaccttaaaccgcctgattaaagaaatcgttgtccatgaacacatcgacagcgataagacacgacacatttctatcgaaattcacttcaatctcaaacccatcccggaggtggaacaggtcaagggctgacctgtcccctccggggcggttctaaaacaattccatatattttttgacacgccgccgcctgccatcgagcaaggttttactcctatttggggataaaacagctcatggctggcggcggcattgtcctgctgggtatgaacctgatcccgcttctggcaaacctgttctaatcttcgcaaaggagtaagctatgcaaagtatcttcgacgctatcacggaatggctcaaagggctgttggtcgagggtatcatgggaaacctcggcgggctctttacaggtgtgaatgagcaggtcggagagattgcggcacaggtaggaatgaccccggcggcatggaacgccggggtcttttccatgatacggcagctctctgaaacggtcatcctgcctattgccgggctggtgcttaccttcgtgatgacctatgagctcattcaaatgctgatagaccacaacaatctacacaacttcgatacatggattttcttcaaatggattttcaagaccttcgtggcggtgctgattttgtccaacaccttcaatatcgtcatggcggtgtttgatgtatcccaacaggtcatccaacagtcggcgggcctgatacaaggctccaccgccgtcacaccggatgtactgaacgatatgcagacccagcttgaagccatggaactggggccgctcctcggtattttcctacaatcgttcttcgttcagtttaccatgacggctttgaatatcgtgattttcgtcatcgtctacgggcgcatgattgaaatttacctgatgacgagccttgcccccattccctttgccaccagtgcaaaccgggaggcgggccacatgggtcacaactatttcaaatccctgttcgccattggctttcaggggatgctcattatggtgtgcatggcgatttatgccgtgttggtgcagagtatcgctacaagcggcgatatgatggccgctatctgggaatgtgtaggctacacggtgctccttgttttcgtgctctttaagaccgggagcctgtcaaagtccatattcggagcccattaaatcatacctcgggccaacttggcccgaagctggaaggaggcaaaaatgtatcaggagccgaacaaatctccgtggggagcggtacagacctgcgacacgctctgccccggcgtgttccttgtgagcacagccagccatggcgggacgatggtttcaaacgaggtggcggcctttctctccccggcagccaaacggtgcggctttcggcgtggcggctacctctgctttgaggaagatacgcaggaggaagtggtgctgcgggagcttttagacaaaaagctctggcagatacccgagcgtatcaaagacaaggccgcctttgaggaaaatatcaaccgctctatcaagcgatataaccccgagtattggcgggccagacagtccggccttgaggcggcgcagtccgcccggaaggaggccccggcccgtcagacagaacgataacctcgggccaagttgacccgaagcaccaaggaggtgatttctttggcctatgtgccagtacctaacgatttaagccgaattaaaacaaagctggccttcaacttgacgaagcgccagcttatttgtttctccatagcgggcggtatcggtattccgttttacctgtttacccgttctcacattggaaacagtacggctctgttcctgatgattgggctgatgatgccgtgttttctgttcgccatgtttgaaaaagacgggcttccttttgaaaaggtgctccgcaacatcatccgaacacggtttttattgccgaaggtcaggccctataagaccgataatttttatgctttcctgagcagaaaggaggaacacccgattgcagaccaacgcaaagacagcaaggccgggcgcagaaagaaagcgtcctgaccgcaagccaaagaaacaggccccggcaagaaagaccgggccacagaccgcacagcagaccatcccgtaccgggaaattttcaaggacggtatctgccgggtcaatgacaggctctataccaagagtatggaatacgaggacattaactatcagttggcgcaggctgatgaccagtcagccatctttgacggctactgcgcttttctcaattcctttgacagctccctcccgttccaactctcctttatcaatcaccgaagccgccccgagagcaaatacaagctcaatattcccatgaaggaggacggatacagcgatatgcggagtgagtatgtggaaatgctggaaggccagattgccaagagcaataacggcattgtgcggacaaagctgctgaccttcggtgtgtcggcggacagcctcgccgccgcaaggccccggctggagcgtgtagaggctgacatttccagcaacttcaaaaagctgggcgtacagtcacgacccctgaacgggctggaacgcttagagatactgcacggccagcttcaccccggcggcacagagcccttccgcttcacatgggatatgatacccaagaccggaatgggaacaaaagattttattgcccctaccagctttgacttccgccaaacccggctgtttcgcatgggttccacttggggagcggcctcctatatgcagattatggcctccgaactctccgacaagctccttgccgagctgttggaggtggacgctgaaatgaccattaccatgcacattcagaccgtcgatcaggccaaggccatcaaaaccatcaagggaaaagtcagcgacattgacaaaatgaaggtggaggaacagaaaaaggccgtccgaagcggttacgacatggatattcttccccctgacctcgttactttcagtcaggacgccaagaacctgttgaatgatttgcagagccgcaacgagcgaatgtttcttttgaccttccttgtggtaaataccgccgccacccgccgagagctggacaacgacctgttcaccgtatcgggtatcatgcagaagtacaactgtcttttgaagcggctggacttccagcaggagcagggccttgtgtccagtctgcccctcggctacaacgggattgagatacagcgtggcatgacaaccagttccacggcgattttcgttccgtttatgacgcaggagctccgcatggacggcgaggccatctattacggcctgaacgccctttcccataatgtcatcatggcaaaccgcaagaagctgaaaaaccctaacgggctgtacctcggtgttccggggagcggcaagagcttcagcggaaaacgggaacttgtgaatgtgtttcttgccaccaatgaccgtattatcattcttgaccccatgggcgaatattccccactggtgcgccagtttgggaaggatgggcttgtggtagagattgcccccaacagcccgcatttcatcaatcctatggatttggatttgagcatggatgacgaggtttctcctatcagtctgaaatgcgacttcattctttcgctcatggagctgattgttggcggcaaagacggcttacagcccgtcgagcgtaccatcattgaccgctgcgcccgcatggtgtaccgggatttgctcaatgacccggaacacgcacccatgccgacgcttcaagacctgtatgaccttctgtgccagcagagcgaacccgaggcaaagcggctggcaacggcccttgaaatctatgtgtctggctcccttaacctgttcaaccacaaaaccaatgtggactataaaaatgcccgagtgctgtgcttcgatttgaagaagctgggctctgggctccgcaaaattgccatgcacattctcaacgatctgtccaacaatcaggtttcctacaacttctcctgcggtattgctacatggtgctattacgacgagttccatgtgctgttgcaggacgagttgacttccagctattttgtgactatctggaaaatgctccgtaaaaaaggatgtgttcccagcgccctgacccagaatgtgaaagacctccttgccagccgtcagatcgagaacatctttgaaaactctgatttcatggtgcttttgtcacaggcacagggagacaggcagattttggcgaaacagttgggtatcagtccccatcagctttcctatgtgacccactccaatcccggcgaagggcttttgttctttggaaatgtgaccataccgtttgttgaccgtttcccgaagaataccaaactctattccattatgaccacccgcccggaggaaaaggaggcccagaatgagtaaggacgcttcgggacaggttgacccgaagaaaacaaacggtgagaaacgggtaaagcgtgggcggctccacttcactgaggaagaagtgacccgtcaggctggggagcaggcttcgggccaagttggcccgaagtcccagagtaccgggaaattcaggcaggacggcgaacgagaaaagccgtcctcccgcttgcggcaggaggacaaggcccgggaagataccgtttgtgaggagcaggccgcccacaaagaccagaaagacaagcgggagaaaaagaaagaacgagccgaggccaaggcggaacactccgctgtccggctggaaatggcaaaggaaaagctatcccgtcaggagccgccgaagccgcccagccttcccaagcaggcggtcatggtggcgggggctggtgtgtgggcctatggacaccgcaaaatccatgaggttgagcacgaaaatgttggtgtggaaggagcccacaagaccgagcttctggcagaggccggagtgcataaggccacccgctacaccaagcggcgtatccgggagcacccggcccggcaggtggagaaatgggaacacaaaaccatgaaggccaatgccaacctccactatcagcagatggcgaaggagcacccggagcttcaaagcagcttcctttcccgcatggcccagaaatggaaaatcaagcgggaatatgccaagcaggcccgtgaggccgcaaggcagaccgccaaggcggcgggagcagcggcaaccaccaccgagaaagcggcggcctatgccgctcaattcgtgcggcggcataagggcggcgctgtcattattctgctgttgttctgcctgtttctgatactcaactccgttttctccgcccttccatcgttgggtacgggcatgatgaacgccgtggtggggacttcctacaccgccgaggacgaggatattttaggggccaacgaggactatactgcccttgaaaatgagctccgggagaaaatcgccaacatcgagcgcacccatcccggctatgacgagtaccgttaccaagtagacgagctgggccacaatccttatgagctgacttcctacctgattgccaaactccgcacctacacccgggagaatgtgcagggggagctccgggccttgtttgaggcgcaatacaagctgacgctgaccgaagaagtggagatacgctaccgcaccgaaacggacacatggacagacgaggacggaacgacccacaccgacacctatgaagtgccgtatgagtattacattctccatgtgcggctccagaacaagacccttcccatggtggtgggctccctcatggacgccgagcagaaggaaatctacgacataaccttggagcttaaaggcaacaagccttatctgtgggatgacatttacacaagcggcggaggcagctatgaccccggaagctactataccattccgggcgaggccctttccgacccggcctttgcggcgctgatctcggaggcggaaaagtatctgggctggccctatgtgtggggcggctcctctccaagtaccagcttcgactgttccggttttgtctgctgggtttacacggcaagcggcgttcatagcctgccacgcaccacagccacggggattttcaaccagtgctcctatgtatcacccgccgacgcaaagcccggggatttgattttcttcacgaaaacctatgcttgcgatggccccgtttcccatgtgggtatctatgtaggcggcggaatgatgatccatgcgggcgaccctattaaatacgccagtatcaatacaagttactggcaggaacacttttacgcctttgggcgcttgaactgattttcagaaaggagctatccatgaccaaacttgaaaaaatcgacaaagagctgtcgaaggcccgtgagaaggctgccgagtggcagaccaaaatccgggatttggagaaacagcgtcaggaagaagaaaacagcatgattgttcaggctgttcgttctctgaaactgacgcccgccgaactggctgagtttttcagcaatcccgtcattaccgcttcgggccaacttggcccgaagcctgatgaagcaaaggaggataccgaacatgaagaataagttttttcgcagggctgcggttttgactgccgccctgttttcttttacctgcatgagcgccacagcctacgcccagagtaacgagcccgttgcggaaaccgagccgcctgccgccgaggaaaccacaaccaagcccttcaccacagatggaacgggtacggtggtggataatgccaccgacgaggacggcaaggagttttttacgattaccacccccagcgaaaatgttttttatctggtcattgaccgtcagcgcactgagaacaatgtgtatttcctgaacgctgtcacggaaaaagaccttctggctctcgcagaagcagacccggagcccgaagtaacagagccggttgtccagcccgaacctgccccggaacctgttcccgagccggagcctgaaccggaaaaagacacagcctttcctgtcggcaatcttctgatggctgccgccgtggcgctggtgggcggtggtgcggcctactatttcaaggtctaccgcccgaagcatgaagccgctgggctggacgaggacgattacgactacgatgaagccgacccctatggagatatggagactgaggaagaaacggaggacgaggaatgaactttaccaacagcccctacgaaaagatgatgaaagagatcccccgcccgggccgtggcggcgctgaccgctgtgccggatgccgccacttgaaagagtgcggcaacagaaaagaccgttgccgcaagaagtttcgcccctcgggccaagttggcccgaagtcctgatgtgccgggaactgacccgtgacgagcgaaagggtatccgaaaactggtcacggagatgtgcgccaattataaccgggaatatggctgcctgccgctggattgtgagtgttatatgcttggcaagtgttggacaggggcttattgccgctacttccgggaggccgttctgccccttgacccgttgctggtagcttccatctgcgaggacggcccggccccggacacccgcctgtgctctatctgcgggcggccctttctcccggaggggcggcaagcctactgctccgaagcctgcaaggccgagggaaaccgcagaaggagccgggatcgcatgaggaaaaagcgtgataaaaacaagtagccccgttacgatttgcctcttgaaaaagcccggaatatcaggcttttttgaaacacttttccgggcctgaatatcctaataccttttgccccggtttggacgggtatttcgtaacacttcatcacctcgggccaacttggctcgaggtcagaaaggaggaaaacacatagaaagcaatcaaggctatgagattttgaaatccgttacctttgacaatagccgtggcttcgctctgggctctgacgaagcggctcccagcccctttgtcacatggcagtttaccgaaacggagaatggccagaaggactactattggggccactaccacagcagcggccagacagcggagaaggattttgccaagcgtgtggccgattacaaggaattgtttggcgtgcatgagcgcactgggggccatgaacaggcggagtattaccgctattactctacccagcggcccgttgacctcggcaccttcccgaagccgtccggcaacgctcccgtggagatcatcaactttgacgagcggcgtatggtggagggcggcaccatgcgggcatggggcgaactttcctatttgaagcccctgacggaaaagcagatggaggattacgagctgcgcccagctcccggcaaccctgaccgggcagcccggccctccatcacagcccagctcaaggaggcggcccgcagagcagagcccccgaaggagcccgacaaggccaaacacaacaagtctcatgaggacagataggaggacgctatgaacgaaaaagataaccacctgctgacagtcgagctctccgaggaacagaacggcaatatgctggacggtattttgaacaacctgccgccctcgccgcttcccaaggggccggagaaaaaggaactggacaaggtgaaggagccgcctgcccacaagcggagccgggaacgggaggagcgctgacggcccggcgcaagcgggacaggcaccttcatgtgatggtcacggcggacgagctggcccagatacagcggcgcatggccgaagcgggcattaccaacgccggggcctatatgcggaaaatggccctgaacggctatatcctccatgtagaccttgccccggtcaaggagcttgtgtccttacagcggcggtgcgccaacaatctcaatcaggtggccgtccatgccaacaccttcggcgtgtacccggaggagatcgccgggctccagcgggactatgaaaagctctgggggcaggtgtccgatgttctcatggagctgtctgcgctggtagaaaaataatttggaggggtgcggcctttatggtctgcaccccttcttttcctattatgtactatttcttttcacctcattattgccattatataaaaagcaaagtataataaagtttgtaaacaattcgggatttcaggaggtatttctatgaaaagggtattggcattatttttggtattgatttgtatgttgtcattagttgcttgtgataaagcaactggtagtggagaacctgtaaggagtggtgatgtttcagatatgcctgagattgataaaaatgtttttggtgaaaaagagcagacacagcaagcgattattgaaagtataagtggaacaattactcgtatagatgaagataaaatttatgatttgaccgaagaagaagtaaaaacaatcgcagacattattgaaaatggcacttggcatacagaagggactgccgaatgtgccaatgattgcaaacttataattgatgaaagaacatattattatcattcggaatgtggaacattcaatgacaaagcgaacaatcagaacttacctgtaacggctgaagagaaagaaagtataaatgtaatactagctcaatatataacacttggtttagagtaattcatgcgattatctttaaagctgttttgtttagaaacagacctaaaaataccagcttatcgcttcgttttggccccgcttcggcggggcatttttaatacctcgggccaacttggcccgaggtgccgggacaagatttactaaccgactgcaacattgttgcccctgcgcctacatggtaaaatataggtagaaagatgatagaaaggggttgaaccaatgagactgatacttaaactgatcgccgcaccgcttatcctgttcctgaccgtccttgtggctgtcctgctgttcctgttctcgctgtcatccttcctcctgacagcggcctcggtcatcatggctctgctgggcgtgggactgttcttcatcagctatccggtgggcggcgtcatttatctggtgattgcgtttctgctttccccctatggcttgcaggccgtggcgggcgctgtcatcacggggctggacagcctgaacctgtctctgcgccagttcatcacaagctgacagcctcgggccaagttggcccgaagtgacacggattgacggcggctcggtggggccgccgttctctatgaagggagggattttctctggcaacgaccaccttactgcaacgccacgccaacgagggcgagagcatagcagaggccatccgtgactgtctggactacgggaaaaatcctgaaaagacagagagcgggaaatacatatccgcttatgagtgcgacccggccacggtggccgccgagttccttttggcaaaggccagctacaaggccatgacgggccgggagcaaaagaagggcgaagatgtgctgtgctatcagatccgccagtccttctatccgggagagattaccccggaagaagcgaaccgagtcagctatgagctggctatgcgctggacgaagggtcgccatgccttcatcgtcacgacccatacggacaaagagcacattcactcacacatctactacaactccacaacccttgactgttcccgaaaattccgcaacttctggggctcgtccttcgctctgcggcgactctctgaccgcctgtgtctggaaaatggattgtctattgtggaaaatccaaagccccggagcaagggcaagtttcgcaattatggggaatggctggctgggcggaaaaggccgctgacctatcaggacaggctgcgggccgccattgataccgcccttgccaagaggcccgccgacttcccggaatttctttccctgatggagcaggcgggatatgaggtcaagcagcgtcggggagcagtcagtttccgggctcccggtcaggaacggtttacccgtctgcgttctgataccctcggagacggctacggcgaagcggatatacgggctgtcctatccggctcccgccagcggcccggccagtctcgccagaaggtcagtcttgctattgatattcaatcccggcttcaagggaaaggccccggctatgaacggtgggccaaggtgttcaatctcaaacagatggccgcctcccttgcttacttgcaggacaacggcctaacggactatgaacagttggagcagagagccacggcggcgacggagcgttttcacaagctgtccgaccaaatcaaaagcaccgaggcggccctccataccaacatggaattgaaggcggcaacggtgcagtatgccaagacccggcctgtctttgagaagtacaaggccagtaaatacagcaaaaagtttcttgcggagcatgaggcggatattgagctttatcgggcagcttgtgctgacttcaagcgcattttggacggcggcaagctccccaagatagacacactcaaagaggaaggccgcaagctgggcgagcagaaaaagaagctctacgccgagtaccgtaaggccaaggcggatatgcaggaggtcacaaccatcaaggccaacattgactatctgctgggctactcggagccgggcagaaagaaggagcaggagcgttagggactgtgacgcataaggagcaaagcgacgctaacacttcgggccaacttggcccgaagcgccgggtttggggaggctccccaacaagcaaattttcacagacgggccgcaaggccgggcttgtgaaaatagcttctgtggccacagaagcattgcttgccatttagcgtcaccccggaaaagccccctaaaaatgagaaaaacgaaggcccttttacttgacctccgtttctctggctttttgtagtccctctgctgtggcctccatgaccgtcaattccttttcgtccattgtattgagcagcctgtcaatatgctggcggcagtcgctttcgccgttctgcctgtcaggataaaagaactggtctacggaaatatccaacagggtgacgatttggtaaaaggtgttcaggcttggatgctggccccggttctcaaaatacatgatggaacgaggggtacggtctacgagctgtgcaaggtattcctgtgtccagcctttcgcctctctcttgcgcttgatctcccggcctaatgcgtggaagtcaagccgtctggtgtcttggtacattctcatatcacccctatattattttacatttcgggtttgactatgagaacgaaacacaattttatgttttagtagtattttattgcccgtcggcaaggttgccgatgttacacggacaaggtataataacagaaagaaaatttgaaaactacactttaatcacaaaaatctatgatacgctatctttggaggtgttattatgcaaaggattttagtcgttgaggacgattttgatattcaagaacttttacagaattttttacaagaagcaggatatgaagtagctgttgcaaatgatggtgtcgaggcactatctttatttgcgggagaacgatatgacttgattgtgttggacattatgctccccaaaattgacggttacggtgtctgtgaattgatacgcaaacaatctgatgttcctatcatcatgctaaccgcattaagcggagaagaagatcagattaaaggattggatttgcaggtggatgactacattacaaaaccgttttctatgcctgtcctgctccgcaaaattgcggctgtacttcggcgcagtaaccggggaacagatgaaaagtatcaaatcattacttatggcaatttgcgtttgaactgtgacggctacaccgccacagtggacggagctaattttgaactgacacaaaaggaatttgaaatactgcgggaactgctgacccatcagggccggatattgacccggcagaacttgttggataagctgtggcgatatgatttttatggggacgagcgtgttgttgatacccatatcaaaaatctacgaaaaaaattgggaatagatttcattcaaacaatcagaggggtgggatataaagttgataaagagaattaaaggcagtctgtttgctaaagtctttattctgactgtggcagttttgctctgcgtgagctttcttgtctatggcgttttggcttggtatatgcctcaaacctattctaacaatctcaatgcggcattagatgaacagaccagcgactttatttatgaattagaacatatccgtatgcaggatagcggcggactttttgatcagtttcttcaaaacacaacaattagcatggtggagctttatactgctgatggtgttctggtggaaacaccgtctaaccaaaatagctttaacgatgggatcaccggggaggctcttggcggagcatcttatgaaagtgcgccgattatatccaacagctattacttctcatttgcagatgataatagccaatatattttaacagtttacggagaagcctctcaaatcgcagaactgcggcaatcatttgtaagcgtattaccgattttgttttgcgttattctccttgtatcgttggcaactgcttgggtgtattctcgtatcattacaaacccggtattaaaaatcagtcggatttctaaagaaatgtctgatatgaagctggaatggcaacttgaggaacgccgttctgacgagctgggtgtactggagaatagcttgaatacgctgtcccggaaactgtctgctaccttggaggagttgcaaagtgcaaatctccagctccaaaaggatattgaacatcaaaaggtgctggaacgggcacaacaggatttcttttcttctgcttcccatgaactgaaaacccctatcaccattatcaagggtcaattagaggggatgctattgggtataggggcatataaagaccacgaaaagtatcttgcccgatccttggaagttgcggctacgcttgaaacgatggtgcaggaaatattaacgatttcaaggctggaaaccaatgttgatttcaaaatggagcattttgattgcgctcccatgatacatggctatttgagggagattgatgatttagtggcaacaaaagaactgcaaatacatcttgctatacagtctcccgcttttatcaatgggaacaaattactgattgaaaaggtgttctccaatttgatttcaaatgctgtaaagtattcgccgcatggagcaagcgttgatattattttacaaaataccaacggacgctttttgttctccgtagagaacacaggtacacatatacccgaagatgatatttccaaattgtttgacgctttttatcgtatggagcaatcccgcagtagaagaacaggcggcagcggtttagggctttatatggttcaaagaattttacaacaacataacagctattgtgaggcttgcaacacagaaaacggtattaaattcttcttcacgatttagcggacaatcaacggcaggtgaacaacctgccgctttttttaactacacataaatcacaaactaatcccaaaggtatcccaaaatgctttgctatacttagggtacattcaaagaaaggattggtaaacactatgaaacgaatggcattatgcgctgcgtccatgctcttgttaggctgtttggccggatgcagcacgacaccacagaatagccaggaacaaggtaatcccgttatcaaggaagaaatcagtcaacctcttggcggctctgaggcgctgggaaacagcgaggacagctcagcactctccgccgcaggcaaagaaaaaatgtttgcaccttatgaacaatatgggatgacctatgatgcggtcaaagatgaacttacctataatgggaatttggttcgctggtttgaggactattatcccatcggtaacaatgaaaccgccggtattgattttctaaatgagaacggcacagtagatgtgtatgctgtacgggatttagagagcttttcaaaagcggctgacggctccgttgatccggggggtaagctgattggcttaaaagagtttacccagcaggaatttgacgcacgggatattgaggcgttgaaaaacagcacatccgttgctatggcaggaacgccgcttgaagatagcgaaactgcaaagctcgttgcagagtatgaggcatttggagtaacctatgatgccgaaaaagatcagtggtatttcaatggtgaggaagtccgctatttccgggatgttctcacttctaatggtgaaagtctcaccagcggaaaattccgaggcgaaatgagaacgcttggaagtggtgttggcacaatagacatttataccgttcgtgattacggccacttgaacagcgaacatcacggaacattaactggcatcgagaaatacagtcaagaggaatttgacgagcatacacaggctggaatatctggaaaccaacccataggtaatgcaagccataactaaacaaaccatttaactgccgcacgacggcaaaagaaaaaaagccgtcgtagagcagacaatttgacacgcccatttgaaacggcggctttgattttcagagccgccgtttctctttggatattcagtaaccccacggcggcccataggagggtgtcgccgtgtccatcttactttctcacaattcccatgaccttcaccagctaaaaaaagcgtagctccccctccgggacagtctggctatgaaggtacaatatatcagtacaattatgataatgtaatttcatgcgtctgcatagcgtcttgctgtgcgggcgcatttcttttgctttgcttcgggccaatttggcccgaagtccagccccggtgccgttctcctccggccttcgtttcgatcacttgtcaacacccaacaccgaaacggaggtacacaatgaaagaaatcaatttgcgggatttttacccgtggtataaagaggatgtcattatcgaagtcaccgaagaagttgcggaagaattgctggcaggtcagcggtacataaaagccagccgccgccgtgtctaccgcaacaaggcgcactattcgctggatgccgaggacggtatcgagtattccgcttgcttctctaacccctccccgcaagagctgatcgagcgcatggagcggtttgaatatctctgccacgctctgaacagtctgccagacgcacagggccagcgggtatttgaacactatctgctgggccactcggtcaaggcgattgccgccgccgagggtgtgacagaacaggccattaccgccgctatccgacggggcttggagaatatgaaaaaatatttgaaaaatgttctgtgagcctgttgtttttgatcttccaaccgacacggttaatgagaggaagatcattctctcctacaactgaatagcgggcaacttggagtacccagcagggagccgggcggcaggtacgcaaagacttttccgtgagggaaacgagcgatcactacccatgccgcaggtggggacgagctatccccacggccacgatctgcaaagggccgcaagggataagctggcagcttatccgctccaacttgccgcacaatccggcgggagtgctggcggaaaattatcgttgtcttgtgacaggccgaacatacagggccagcactcccagctttctatgaaaggggcaaataaaactatgggtgaagaatggagcaacaacgcttgccgtggctatgtcatcaaggcgatggaaaactgcggcttcaagtcaaaggacattcggcaggtgcttaccgagctctacgaggtctttgacttctgcgctgtggaggaagcggcgcactattacgaaaactggcagtcctgacctcgggccaacttggcccgaagcgtggagaaagacgaaaggacggcaccgttctcttggtgccgtccttttgtgtttccccaccgagacaatgcgggaaatatgctggcagtcaacccactttgaaaaggaggcttctatggtgcaatccgttacttatcagagcgaaaccaagaccgtcccttttcaggggaaaaccattgtgctggagagtcttacgccggtactttcccccaaggaaaaggaaaaacggaaaaaagagattgaacgctgtttgtatgaggtattcagcaaataccgggtggccggggacaaacggcgctaacgctccacaacattgttgtccggggctatcaatggtataatatacttgtaggttggtagctccattcccacaggaaaggagcccaacatgaatattagagaagatgtaatttatgcaagacagtcggtagaccgcaaggacagtatcagcattgagagccagattgatttctgcaagtacgagttgaagggaggcagttgccgggttttcaaggacaagggctattcgggaaagaataccgacaggcccgagttccaaaagctccttggcgagatccgcaagggcaaggttcgccgggtagtcgtttacaagctggatagaataagccgctccattctggacttcgcaaatatgatggagctgtttcaggaatacgatgtggagtttgtttcctccacagagaagttcgacacctcgaccccgatgggccgggccatgctgaatatctgtattgtattcgcccagcttgaacgggagacaattcagaagcgtgttacagacgcttactactcccggtgcctgaaaggctttcacatgagcggccaagccccctatggctttgaattggagcctacggtggtagagggcatccgcacaaagatgatggcggctgaccccgtggccgctaaccatgttcgtctgatgtttgaaatgtacgccgagccggaaacctcctttggagacattacccggtattttgaggaacagggtatcaagatttatgggaagtcattgacacgccccttcttgtcccagctactccgaaacccggtctatgcacaggccgatttggaaatgtacgagtttttcaaaagtcagggtgcggtggtagttaatgacgccgccgactttgccgggacaaatggctgctatctctatcagggccgggatgtgaaggaggacaaggacaagagcctgaaagatcagatacttgtgattgctccccatgagggctttgtaccctccgacatttggttacggtgccgcaagaagctgatgacaaacattaccttccagaacgggcgcaaggcccggaacacttggctggccgggaaaatcaaatgtgggaaatgcgggtacgctctcaaaacgacccataacccctccggctatgaatacctgcgctgttccaaacgggccgaccacaagggctgtccggggtgcggcacactccgcaagaatgagtttgaacagttcattttcaccgctatgggagaaaagttccgggagttcaagctactccggggcggcgaagaaaaggccaacccgaagatcaccgcctatcaagtggagctcgcacaggttgaagccgagattgaaaaactacttgatacgctgaccggggccaacgccaccttgcttgcctacgctaacaagaaaatcgaggacttggacaaccgccgcaaaacgctgtccaaggcgattgcagacctgtccgttgaaacgctgtcctcccagcagattgaattgttgtccgggtatctggacgattgggaaaacatcagctttgaggacaaaaggaaagccgctgacggcctgatttcatcaatcagcgcaaccagcgactatgtaaagatagagtggaaaatatgacctattttccactccatcaaaccacttgtttctttataccgcttgtagccccttgtaaaccgttgcttgccattggtaagataattcaataatgttgcaataaaacaaattgccgcaaagcctagtacaaccggagcattgaatgtgatttttatttttcttttcatcttcagtcactccctgtttacttacttccagcctccagaagcgcctgcttaagttcttgttctacttttacaagttctgtctctgcatcctggcgtctctttgctccttgctcatgaatttttacaacctctgatatcgaagaaataagctgctggttgcatctctttaatgttgctatatccacaactgagcgttctgcttcttttgcagtttcaaccgttgccattttgagagtttcagcatttctagtcaataactcattcgttttttcagttatcatattttgagcagacaatgctctctgagtatgttcaataccaagtgccaaaaccatttgatgtctccatagtggaattgtgttaaccagagatgattgtatcttttccaacatttcttgatcattatcttgtaacaatctaatttgaggtgcaacctgcattgcgattactctagtaagctctaaatcatgtagcttcttttcaaagcgattgcataaattaacatacttattgtagttttcaacatcttcttgcatttgtgatgtttcagcttttaccttcaacgcttcaagttgttctcctcttgccttatccaatgcctttttgccagcaataatatacatggtcaattctcgataatactgtaaattcagatcatacatttgctcaaacatttcaacatcttgtgtcaaaactacttgatgcttttctaagtccttttcaattcttgaaacatttgtttctgcctttgcataattagccttaatagaatctacgccccttttagctttttggaatattccaagaattcctttcttttcaggttctgtggttgcatccaaagcaacagtaagttcttttagcgcatctcctacatctcccagttcgctagtttttacttttcctaaaatatttacagaaaaatctgaaatacttttctgtgcactggaaccatactgaataacctgcttggcattagaaatgtcaatctcatttgcgaactgtgctaccatttccttctcatcattactaagcatactttcatcaatagatccagcattatattcagtctgtgtctgtacaataggttgaactgtctgcctcacaggagcgccctctagtaagatatttgactgtttctcttcttccggatttaatgtaagttttgtttttgtttgattttccatagctagtctcctttcaatttacgcattagtgttttaatgggccttcgcccttaacatatccatcttgtcccattattttctgcaaggcattcgcttttgctatggtatccatagttgcgacctgatatatgctatctatttttctctccactgccgctattactgtgtcaatcgattccataaccttagtatatactttatcaatctgttctttcgatacaccagccgttaaatactgctgatgtgcaaatattaaccttaatgtttctggcaaatagtaatttgaaaatctatgcgtcccctctaccttatctggatacttttccagggcggtactaagtttgtgtaacttttctataagaataccaatttgcttttccatatcttcgtttatttgactatgctgtacatcttcaaaataaaaaatatatgaatccaagtctgccccttctatgattttttcaatagtagtctctattttcatatatttcatatcatcttcactttttgaagattcaatagtatgcaatactttaaataatacttccgtatttggtgtcgatatatataggttctcaccattagtcagtacttctaatattattgggcttccttcaaattccattattgctgcaatatcgtccaacagaatctcatatatatcacttccaccataaaatccaattttgttagaaaacaggtacagttttcctttaatagatatatactgtccatcaccaacttctttatataatactgcatgattcatataatgaataagttcattctcatctactattataccaagatcttcatgtgggaacaccggtagtgagccattcaaaatattgcttataatatcatctggcaaaatattagaaatttccttctgtaggtcagagtgttctgcaatatactcatataatcttttcgctttctccattacaatctcactctccaatcttggttcattcttaagtatcactttaatcctaaaaaatggtctcctcattttacgcatttgtgcatcggaaatatatatatcttcagtatctgaaaagttccattgaccatactctatatcagataatcttctacaatctgcaaatgcactatcagcaacttcggtcttacattccattcttacactcgacaaatatatatcatgcgaaaaacaattttcaggtattcgatcaacttttttcactgaaaaagatgttaacctactacacagagaaaaactttcttctcgtaaatcctctatagcgtttatttcaacagattctatacttgataatgtaaatgcattagcaccgatacaatccatttccgaacgaatctgtatgtcttgcagtgactcacactcagcaaatgcattatcgccaatttttctaatacctaatccaaattttacttttcttaaattacgacatccaaaaaaagcaaaatcgttgattcttaatattgaatcaggtaattgtatatgctcaattattaaattattcgagaatgctttttctcctatttctactacttcctgtcctgaaatcttttccggtatattaatccgcttactctcgccattatatttatcaatcgagatctgacttcttgttatgttatgataggaaaaatcacatgaatgtgtactatttaaatccatacgattcattaccacctttatctaaaactaactgcaagtttagatgtcatgttgttctcaattaaccaatttaatatatctggggttaaatcatgaacacttgcttttccagatgccactttcttgagaaaagcaagaatttcggcaccatcttctccaaaacccaaactatttattatctcgtctgcttcctgcaaacctttttccatcttgtccagattatcctgtttaaaatcccaagaagcacccaatttaattttattgattgcataatctactttttctcgctctggtgcaataccttttatagtctgaagcatatttatctttgggtctgccactctatgatagtagtttgaccattcttgaagtattgctttcttaatagtaaatacttccttttgcaaataattagccgtagattcttgtattaatcctctcgatactgcatcgctcgatgatttaagcaatccaatatcccttcccctagtttcctgcgagataacaaatcccaattgagacatactgtttgtaacagcattaaccatcagatgattctcacttacgacattagagaaaatcttatcgtttttttcctgtttttgtacgtcattagaagatttttctaattcatatatttccttcatagcaattatgctctgatctaataaatctactagcattacatcaccttccaatccataacagtcttactatctgactcaatcttattgcgtgattctgcatatctcgtactcaagtcaccaccattatctacaaaaatattgcctcttcttttttcaacatctcgtgcaacatattcaatatccttttgtactgcctgtaaagtcgacaatatacgttcaatttttgacaaaggatcttttgagaacatcagcaatgtatctaaatcatctgtacttgcaatgcccttttccacctcactaaaagctactgaaatggtcttagcatctttttttattccatctagaacctgaatattcccatgaatattaactaatgaattgcttgcagtctcataaaagtcctttattttatcaatcaaatcttctatatcttcatcatcaatatccttataatccaaatatgtaccgatttgttccagtaaacgatttgctttttctttttctgcttccgcaacttttggaatacgcgtatatatcttttcatatatctcacgaagttctcgacgttgtggaattggatcgtttaacagaatttgttcatctggtatcaataactttgccttctgaactttgcgtacatcggaattaaattctgtcgctctaataaacacctgcgatgatttcaagttaccttgaataatattgtaatactgcgtaatcacatcttttactttttcatcattattcaaaagcatattcacaagcgaattccattctgtacaatgtgaattttgtacagtttttttcagatttttagccatcagatttgttgttggaataccttcaacttttgttcctgtaaacactccttgcattatctctcgtatcatttcagtagcaatcgcacaatcttgataatctactggttgattatcaaaaacatttacagtctgaatgattgtttttttccacttttctacccaggtctgaactcgatacaccatcatagcagaattatcaaaattccagcttccatttcctaatgttacatatgccaaaaacgcctctaatacgccttgcgtttctctatctgctggcaaaattgtcaatgcattcttagctcctcttttctgtctttcaaatcctataaagtcctttgtatcttttacacgatttaaattatccaaagatacgccttctatctgccaattaattgcagatatcaagaatcttttatttatttcatctctggcttttgtaatattaacaacgtcttttgttgtagtacctacatttagttctccaccatcaatccaaatttgtagtgttctctgtccaagcaaaaaatccgccattgccggatcaactttcggtacgatatgttctggtggttgagtaatatctgagccatccgatagttgttttactggatctacagatgctttaaccggcttatcaccttttcttcctgtaaaagttggaattcctaaatcatcaaaaaatccaattggcattccacctaaatattttataccgctttcttcatactccagatctgatgcattaccccaaactcttatgaatctttcaactctgtctgcttggctttcttcaacttgctgatgaatataagtacttacatatagactctcaaatggaatatcattaatcctttcaattgcaaattcaggaaaactctcctttttgaatagataatttctcatagctctctcaataacatctcttaatagatatctaggagttctataatccggctgcaaaatacacatatatagattcgtaattgcttttttagtaaatgggaataacgataattccttcccctttgcaatttcaactgtatcccaaagagatttttcctctcctttatgaataggatactctttcatagaagcaccattcttcgcccagtcatctaaaatatcgccacgcaaagacattgcatttagatatctaccaacaaattcatacagcgaattctgatcttcaccgaacacatcatttggaataacaaagaattgcgtaactctatccttatggttatccataaagtttacgttaaaatatttttcagttgttcctacaatagaggaaattctacaaagttcttgactttcatacattccagtatgttcagtagtcaaaacatttagcagtgcaacatttacaccagtaaatgctgtaacatcctcaatcaatagagtaagatttttaccctgtcttttaatctcttttctaatttccacaaagacctgttcaaaatctcctggttccaatccagcacatgtctgaataaccttatttaccagagtattcatataatcagctagtctttctggcatttcatcatccgcaagaatggcatttgccattttcatggcatttttagctgcaccattggtaaacatatcatcgcaaaaattaacatccacttcaaaatctgaagtttcaaacaacgccattacatctctgctatcaccagtttcattttcagctactttttgataaatacgatcgatagcaccttcttctttcattagatttagttgaaactgttcgtattgcaataattcaactaatctcttcttttcattattacttataatctcatcattttcatcgttcttgatttcaacaatgaagttttgatatatcatatctttaagcttcttattgtcaatcgttgaagttgctcgaaccagcctgtcatacacagccttattcggtatattggcaacttccggcaattcgagtaattgctttatcgttcctttcaaactattatcacttctacgaacaaaaagaactacttcattttctggtgccgcctgttctaatctagccgcaaaccatctaataaggtgtgattttccagcaccacttgagcctatcactataataaactgatgctcattttcagtattcaagacatatttattaaaaactttctcttcagacataattttgtctgttttactatcccacttttttcttatatgaatattttgaacaggcacatgagtagctaagaaatcagcttgtgtactcgtaacagtatcaatacgaattacttcacctattctactttttgcaatttctgaattcataaactatctccttactgttacatgagtaactgttgatttaattggatgtaattctgcttcatataggaaccacatatcaccactatcaagcttgtgtgataattggataattcgttcatcatgtaatgctcgtaaaccacttgacatagcaagattgattttcttatttccatcaatatcggataaccctatttcagcatacggctttattgcagccacgaaatcagtaaatgtgtattcttctcccttttttatgttgcatactgctaatacggcttttagatacgtatacatgttaggcaataaaagcatatcatgaagattaccaagccccaaatatgtagcccagaatctccaagctctcatatcatcttcatatactggttttcctataacttttgacatatgttctactaatgcagcttcagacactcctttaaacttaaacacttgttcattcatcgatatatattcttttgatacagcaaagaataatccttccgatattgtatctatattgcctacaatatattctcgcattgaatcatatgatgatacatactttgagtctattgccaatgatatatcaccttcctttacagaaataagccctaactgtcttgctgcatcacgaaccattccaaaatattttgttgtaccacctaaatccgatggttctaacaactctcgcaaatcgctttccttcattgttctgcttttaatcgcttggcaaagggcatataccctttccggaattgcagatgttttcattctatcttcaaacatatctctacatcctttctatcaaatattcttcaagtaccggtccatcgacaattgatgaaacggttttacctatttcattacaaaaaatatcttctttgaaaacatgcaataatcgtatttcaccggtttgtaatgatttccgtaatctactaattttcttatatatgcccgagtatttatttccatacaaaacaactgcatctcctgcaaagaaataataatctccatggtcaaccaaccgaacaaactcattcattcccagcaaatttacatctgtccattctgaaatactatttaacaaattaaaataactgctttgatcatcatcatttataataacagttgaaaatcctctattaattacatttcctattaactctgtattatcactatccgcaaataaaatagcctcattagaattagcaaacatattattcaactcaacagaaaactttcttgttggagccggaattttctttaccaactcaaatctatttggatctgattcaacaatattcttatgattgtcgcaaccagcacagtattctgaaaccctactatatgtagaattaaagaacatctctgaccagcacatgcgctttccaagcttaacagaacgactcatggtcttaaatgctctttcattcttattccattctttagtacgaacatcttctatcaaccgttttgtatcctccgaagtctgcagtaatcttttatccaaaatagatattcttataaaatatacctgtgtatgaggatctacgaccatatctaaaattttaatcaaattgtatcttcttaacagaagaattacatagatattccacttttgatcaacagtactggtatcctccgcataatccacactattataattaggcttaacagatgtatccaaagtatatgaatctatccctcttgtggaagtatggctattaagcatactctcccatcgtccaagaattttttcacttccaagaactttgtcagtcataacaaatgccgattccaaatcctcttctggatatacacacattacactaagacaaggaagaccatctcgccctcctcttcccaactcctgataatatgcatttggattatctggtacatataaatgtaaaactgttctgacatcacttttatcaacaccgactccaaatgctgaagttgcaattataatgtcaaacttgttttctgaccactcttctataattctagaacgctcatcagacttcgtttttccagtaaatgtctctacatttgtaatacctatatctgctgccatttccttaaccttttcagcttgatcaggtctcattacatatacaaccattggtcgaggtaaacatcgtaataattctcttgttttttcattcttatcccgatatgaagttgctgataccaactcaaatcttggttctcttcttaatgcatcacatcttatttcaatccatttatctccagtagcaaacatactctgtaaaatcttaactgttgttctttcgtacgttgcagataataacactgttttcaatttagaattcttttcgtataagttattacgccaaggttccaaacactgataatcaactcgaaaaaaatttccccattcaattacaatatgtgcttcgtctataataagatttcttaaatatccagcatcattagcagtctctatcacttgtttaaatacttcattcttaataagtgcttctggagaaataaacaataatcgtagctttctgttttttattctatctataatgcttctcttctcttcacttgctaaatcactataataacaagcgatttctgctttggatgcgactcgaatattatcccttgcaactctaacttgatccattgctaatgatacagttggtacaacagtaatggtcaatccatcatttttttgatacgccatagcttgcgtaatcaaactctttcctccacctgtcggcaaagaaaccaatgctgtatatccttctggcatattaagtgcaccattaaccgcaagtttttgacgtattgatttgaatctctggaaccctgttaaacgatatatattaggtgtaaccccaagaaaatatctttcatctttttctggttctacatagtctaccatgaatccttgcttgataatatctatgttgagataatccggcaaatttaaggttgcataacaaagaccttctgagtcgatacggagtccatatttattatctgtgatatcaatatcaataggtaatcgtacagctgtctgaaaaacaagcagataatttctaagcgaaatcaaaaagtcatccagcgatattctgcgtgttctataaaaattcacatacttagacaacctatatgctgtcatatatctatatttttctattccgcctcttggacaattatttgtgcttatcccacctagttcattatccaaaattttttgtatgcattcttgaatctgctctttaatcatgcgtcttcctcaccattacaaatgctgctgcctcgagttctactctagttgttctcagtgcttcaagcaccgtctgataaacctgctttttctgctcaatttcgcctgcatctacaccaaaaaacttagcttgtgcaacttctgcattcaatgtctgttctatactggctgctgcttgttttaaattgctactagccttcattttttcctttacctgatttttggccgccttcattgacgcagaaacgaaattaatccacttgtcctctggataagcttgtctaaaccaatcaacattagaacaaccatatctttctttaatatgtagcccatcagtttttactgatctcctacctagatgcactacttcccttctaatatcagatgttgattctcttgaaacggcatcaataatttttaatactttatctgtaggtacatgctcatacttttgtgtactgataggagttatgacttgatcagcagaaacataactcttatattgtcttatcgcagttaggggaatcccattttccaataacagttgctcattggggtataaattccaagtataaacaattcctcgccaatcaaaatccgcttcaagcgcaaaagctgtacaggttcctttgtacgaattcattgcattatctacaatacaatcaaagacctcatcccctggtgcaaagaagtgtaaataatcattttcaatagaaagttcacgattaaaggttcctacaatttccctgctgcctgtagatgttttatttccagttctttcttcgtataattccctaaccctccttgaaaaggcatttgatgtacgatttacatattccatccaattcggtggtatcaacattgagttttctgctgactttatagagaatgaattttcattaaatctcacaacaccatttttattaaactgaccttttaatcctgcaagacttgcccatcccatcattgtattggcaaacaattcgttctcattggatgtgtagtagtgtaaaagtctttttagctcttgattgagtgttgcatatataaacgctgctgaatcaaagtgttgctcctctctcacttctttttccattcgttgtgaagaatctataatctcattaattgcattagaaataccatatcggaaatcacttgttactgcatgaataatgctctcattgatttcattcataataatttccaatccacttaaagactgagtaaatatattcagtcctttattccagaaattatataattcttcttctaaagtttcttttgcataagttacaaccgaacatacatctttatctgctggtcgtcctaatctgtctaatcgacctattctctgctcaatggcatttgcatcccaaggcagatcaatatgaattacaaagtctgctccctgaagatttctaccttcgccaccagtctcatcacaaagaagtattttacattcatcatcattttggaaacgataaatactcaattccaattcttcttcgttcatattcttgttaaagagagctatcttttcttctccaaaatatgctctcaatacttgaccatatttttcaaaggtttctgcatagtttgtaaatattactactttttcctcacatatttcctgatcaatgaaatcaactatgctaagtattctacttgaatagttatatggctctgctaatacattatcaagctcttcaagcatccattcttctgcactttgccattcctttgcattttcttctacatcctgattaatagctaatccgctttttctttgctgctcaatctccttattgaacgcccaagatgagctaaaaaatgctgtaagtaacggaatataatgtatttcaaaatcttgtgcagaaatttcctgtccgcttatccaatcaacaatagcttcatatgttgtatgctcgtaagtgttcttatctggattaagctcatattcgatttctctgactgttctatgtggaagttcctcttccatatatctacgtctatttctgataatatttttttcaagctgataattctcgcatacatacagaagagcctcttgtattgcacccttaccatagtcttcactctccagatttatttctgataaaaccttatcgaaaccttcatcctcaataagtctagaaattcttctaaggccattttgtatatcatcaaacaaatctgtacaatcatcattttctaaaggattctcaccatcttccaaagtatcagcaatattatctatatagtcatcaaaatcctgtaatacaaggtatgtactcttggtaatatttttttgtttttctacaagagtttgaaaatcttctattgaaaaatggtcatatttgtcaggcataataagttgaagtaacgccaaatatgcttctttcttttgttgaaccggagtggctgataacaacaaaatattctctgagtgcttactaagcgaatgaaaatatgtatataaccttttgtttgctaaaagtttatgagcctcatccgctataacaaagtcccaacggctgttaatatatttctcaatatcttcttccgcaataagttcaacataattatcattcacgttatttcctggtgttatttcaaacttaatgagtaattccgctctccactgtgctacaagaggtcgtggtactgctattaaaactctcttatttgaattatgtaatgtatatacttttaaaacagaggcagcctcaatagttttacccataccaacttcatctgctaacatcactctacagtttttttcttgtaaacaacgcataatagttctgagctggtgttcttttaaaaatatcttacatcctgctaattctttgaatccaaatactgaattatcaagaacttttacagttttactcacgacatttcttccaaaataccacgcaggattctgaaactcataacttctaagctgctctgctggcgaaattctgccaccattaaatggtgcatctataacgtcttctctaacttttataactttatctgtaaattcttctttgaggtaatagtaataccattcatcctccttaaatgctgacaatatcttatatctatttcctctataaataacataagattctcgatgcaaagtacatctctttacatagtcatatggtaattctgctttctccggtatattctcataataatttctaaatccaaatggatctaaaaatgccactgttacatgctctgtaaaatcatccacttgaattatgcgacctacaataaaatttcttgggtcatcaaattctgctattggacatcttatgtacattcctctttccaaaagctcaacctcccttatatttcaaccaatgatttgtagttttcaagacacttctctcttactgcacaccattgacaccatatatttgcttctttgtcgtaacttgcatttttaagattatccggcaaaaactgttttttctctgccgtcgtcaaatcattgaatttgccaagtaatacattctcctgattttcattttccaaatgcaggtatatgaattcttctttctttctcatcatttcgaaatcaatatctgttacctttggaaactgttttatcttaccatcctgcaacgcttgatgaataatcgcactcttagcattcgatttgatatctgttatctcagattcgttcaaaaatctaaaatatcgtctcaagcgttctgctgaatcatcaagtgtctcattcattattgcctctgtggcaatttgaccttctaatttacgccgcacattatttgccagaattatctctagatatttcgtctgcaggaatctatcttggtacttagtaccattttctattaacgactctaatgcaaatctatatccacatatgcgtcttctaaatccgtctaaatccgcaaaattatttgtatttttacccaaatcaaatgtgatattttgtctctcatgaacctctgtcgtatcatgaatatttttttctgttttaacccctaacagttttaagatataatacagttcattttctttattatcatcgttttttataaagctaagtttaaacttacatctattaaactctaatccataaatcagtgcatatcttttaaaatgtttaaattcttttcttgatttcacataaacctgatatttccaatctaatggttcgtatgctctttcaaaaaactctatagtcaatggccatgggaattgatcttctcgttttacattcatatcagaatcggacacacacgcaaaatgatagattgtgtctggatcctgagttgagcttttcaatatatctccatcaatttgctggaagtctctgacaatccagtttgcactttcacccttctgactttcctgtttcaaataatatgccattgtatcctttaaacaatcaaatgtgctagttgactcgattttttcaacttcttctagtctagctaatagtctcaacaaaatatcctgaaactccgtttcagcatctgcggttggaaggatttgtgtttctacaaaatccttcaatttctcataaaaatgcttaaaattattattctcattttcaaagtcttcgtagaatagttttgtaatagtgtttagtgcctcaagagattctatcaactcatctatttcatctgattgaacattaaaatatgataacctctctaattgttcggtatactctattttacctttattcagcttggacatttgttttttcagttttatcagcaaatcaattacaccatcagtctcactatctcccttcagctttgtcgccctagaaaaataattttttgtctgattaaaggtagtaattaatgaacctactttcttttcatatagagcccctgaatacaagcattctgcaatatcattcatattctcgattctaataccaccattttcgctgtcccacatattggtaacggctacgaaaaaatgtccaatcggataagctaagaaatgcctttccccaaattgttctggaaaataaactttcaatatatcatttacagaattattggcagaataaaactgctccttcatgtacgaaagaactgagccgttcttatgttcgtctgcatgaaaatctttagcagcctcttcatatattcgtgcaacatatgctgaaaattctgtaatattatcaaactctacaacctttacattatttatatccttgcttttttcaatgagtgttccattagctaatcttccaatttgatctgcgagcatatttccttcgtagctaggctgcagcaatgttgttggcttaaattcgttattgaactgactctttatattcaaatcaaaacaggaataaacatccagccatgtttgatatatctcgttatactgttgttgataattgaacaacagcacgacacgcttgtattttgaaacctcttcaatcattgaaagaattgttggagtaaattgatgtattccatgaataactaccgtattacaatcaacactctctatagatttcacttccttacctcgccttttatcttttgccaccagtgctgttttaacagcattatcaatttcaccttccgaaaaattcttttttaatgcaaaaatttcggcattctcgcctcgcagaattgcattataagcagcaaccaaatacatttgctcttccgttatctttttgatttttatattttttaataacagccccatttcaaccatcagtcgaatactatccaacaatgcactcttattgaatcgtagagattgttttatcttcttccatctttcaggttcaatgtttggtgtcactttatctagtgtattggttaaaattgtgtactgttcaatgtatgtttttgtatcaaaccatcttgggtataatgcttctactaattcttctactgttgctaattgtccattatccaattcgtcatatactgctgacaatccatttaccattgtctgtgaaacgcaaaaatgagcacagtttcttattgaatcccaatatggttcattatttatttcatatggattgctgtaagtatatattgataatgacattttatacctccattaaattctgccatgaaatcttgctctttgatttaatatccttcatccaaacaacatttctaatagctcgtgttagtgctacatacaatactcgactttcttcattaattcgttcattttgttcctgcgatacatcataattggaattatatttcttgtttggttcatctccaattctaattccatatgccagtttttcattttctacatacacatctaaatcagctttcttcattgatgcaatatccatacccatatatggcataattacgcatccatattccaatccttttgctttatgaacagtagtacaaatcactcgcatatcatccatctcaacttcaatatttcgtgcgagttcttcctgctttgtcataatatttatatgcatgctgtgttctatcacattgagagttaaaaaatctacgctatatgttttaattattttctctaataccaattcataatttgctttatagaatctttgctcactatcggtatccgaatattgataccaaggctgacatccttcataaatactcctcagtagcattaaaattggttgaaccttagcatccacaattatcttttcccatgttttgttcatcacaattgtgaaatactgattaagtacatctgttaacttttttacctgctcctctgtgcctaagccatgtaatccttgtatatctaactgaattcctacataatttgaatctattaaattaaaaagattcactggatctctcgggttaagcagtgcaattaccaatttatacaaatctaaagcaggtataagctgatataaatctccacctacatgagtttctataaactcacctcgaacctttgcttcttccaaaatattatgaatttgccaattatctcttaccaaaatagcaattatcttatctttagaagatagtttatgatgcttggatagatattttataatatccttctgcctttcgatttctgcaaagagctgttccatcctctgctcatcactgttatactctaattgggtcaccaactcatgttccgatagatatgtctcaacactactggtcagcgaatcctttcctttatgaaatggcaaatatccttttgaacccattttagaaaatactgcatcaaatttatttaataatctcttatcagttctataatttatggtaagtgaaaattcttcccatttttctttatctgttctaattaggtcaaacgcactaattgtcgcacctctaaaacgataaatactctgctttaagtcgccaactacaaaaagctttgtgtctttaatcacattttgtaactttaagaaagaatcaatctgaacatcatcagtatcctgaaactcatcaataaataagtacttatatttaagaccacatttttccttaaatgctccatttactgcatcgttcagtaatagcatactttcttttagatcaattttattttttgaaaatatctgttcttcgtattctttttctgctggtatcataaccttcattatgacatcattaaaaaatggccactcttcaaatgttcccagattttctgctttaagttctttaatcccatagctcttattatataattgctgtgaaaaatgcattaacaactttctgaacttatgaacaggcattcttagttgttgggcaaaattcgcatcttctttttgcttttcaaccagaaaatcattaagatatttctcatatatctgctctttcgcatactcacttgaggaaattgcaaaatccgcacccagtccatactccatagcgttgctttgcaaaacagctttagcaaatttatgtatggtcgaaatctgcattaagtctacagcctctatttcatgtagcacttttttgtttttggtaagaatataacaattcataaaatactgctttagtcttaatttcatattatcagcagcctcattcgtaaaagttaccatagcaatctcatctacaagattatttataaatcgttttctactcatgcacaaataggcaatacgagataccattgaataggttttaccagttcccgcacctgcttgaacaagtacatttttatcacccattgcatgttcaaccttatactgatcaaaattccaacttgtggaatttgcaatttcttcaagtatcaatttttgttgttctgtatattgtccctctacaataatttcatcgttattcaaatccaaattatgtgtatagatttcaaaattaaatattctaaatgagccaaatacaccactaaaatcatttctttcatctatttccgccaatctcacatttcctttgtcagaaataatacctctggcattaaatcctgcttccaacttattgcaaacggatgacaaatctatttcactcttaacaaatacaacaatctttgttccggcaaaatacatttctatcagttcatctgaatccttttctgttaattctttgttgaataccttcagtaatgaatatgcatccgaaacctctacaatttgatcatcctttgccttatatgatggttcaaaatgttgccttactatagccattgctttttcatcaaatggagtactatttaacggctttttcttgacaaatgcatttgatatcttctgccctagcttagttgctgaattcaggtcatccgagaaaatagtaaaatccctagatgatactatgtctaaccttacatccttatattctttttctgatataaacggataacataccattgataatacaactggacttattgcaaactggtcattcaagaaattcagccaatcaaatctatatcctcttgcctgtttctctggagaaccataaatttgggattctccttgaatcacaatttcatcaggacctttcacatcaaagatgtactgagactgccatccttttacttcaatgaccataattccaacattttttataagtaatgcgaaatcaaattcacgatcatcaaccacctctcgatgattgtagactacaacatcgttaggcaataatgaagacagtttttcccatactaacgcttcacctttatattcagttggcttgttatccatcattagtgccataacgaatcgttcctcctaactttctgtcttgagtaatttaataaattcttctatatctttttcagttgtgtatttatttatggatacccgaagtaccttggttactttatccgctagtcccaatgcttgtatcacataagaaggttcccctgcactacatgcagaacccgtagacagtgctacttcatcacttattttcttaataaatctctcattatgaaaatctgatttttctacaactaagctaacaatacctggaatacgttttgaagaatctacagttgtatgtattccatctattgttcttatacctccgatcaacatatcatctagatgttttatatactcatcattcttctttaaatctctaagtgctatttcagcagcctttccaaaaccaacaatattgtgtactgcatgcgttccagcgcgaaatccaaattcttgctccccaccatgcataaatgctgtgataggtgcaattccataggcatccgatttcataaatgctgctccaataccttttggaccatatatcttatgtgccgaacatgaagcatagtcaattcccattttcttgacatctatttttatctttcccaatgcctgagttaaatcagcatgaagtgctatattattcttcttacatattgcagccaccgcttcaacatcacttatagttccaatctcattattcacataaagcatagatacaagtgctgtattctctttgataaaagaagaaatctcttcaacattaatctctccgtctggggtgactccgacaaatgatgcttcatatcctctatctacttttttctttccaccaaataaagatgttgtaggatcattgtttgaatataattcaccattcaaatacttacaggtgtttaatgttgccttgtgttctacaagagatgtaatcacatgattcttgccatctccataaaactttctataatccaaatatccctttattataaagttagagctttccgttgcacctgccgtaaaaattatttcctctggttcggcaccaagtaatttgccaaccttctctcttgcgttttccactgcatcccttgcattggttgccttgcaataatatttactagatggatttccaaactcctcgctcaaatatggaagcatcgcatctctaacttcctcatcaataggagaagtcgcactattgtctaaataaatcattttatcatctccgttcaaaactcgtttcttgataattgacccttaattagtttttttatcaatgaaaaaccttgatatgacgcatacccagtaaaagtaccaccaactaaccaatcttttacatcaatttctgttttatttaggatttctttaaagttgtcgtagccagttacattattatcatatacttcagaaaacaccccaaataatgtattaacaccaattcctttacatatattatatgagctgttatatgaaccatcatcgttgaaacattctgaccatcgttcctctacacatttccacacattctcaatcacgccgcatatatcatcaactatttcttcgtatttttccgcgcataattgattattcaactttaattcgcaatacctatcaactattggtcgaatacttctagagaacgcaattattgatataggttgttcatttcgatttcccacctcatcagcttgaataataaggccataccatttacttgtaggattaccatttaacttgtttgatacctccattgaaatagccaacttgatgtcatcatcaacttcacagcattcactattatccatcgcagatttagttttcttgttctttaatgctaccgctaagtctgttctaacttttttccctttactattaagattaatgaacgcgtcaatttcaatcaaatcatttggatcctcgataaccataataattaccggcaaatcaaaagtttcatttagctctttgtatctatcaatactattttttgaataaccttctttaaggcacttcatgccttcaattctatgttgtccatccacaattctaatcttatttttaattataagattggttccatcatattcataatcatctttccccatagcagcaataatagccgatggcagtatcggtttgctttctgtcataaaatatttagcaatctttctataatgtgccggcattggaggacgttgataatctgtttcatttgtcgcgttatagcgtttgactacagaatacttttctagttctgatatcttcatcttggtcatgtacatcaatacattttcttgttttaactgcaatgattcaaacattacgcctcctcctttctaagtaaaaatattctctctaagtcttcttgattaagacaatttctttgtttaatattatttataacctcttcggacaattctaaactataatcattcttatgttctgccaattctaacaatttaattaattgaccatcttctagacttcgtccaatacgataggtcgtagaaacatatataattaattccaacaattcaatattttctttaaataagtccgtatcaattggttcaattccgttttctacttttttctgaacacacgccaactcatttcttagaatttcttttgtttttgccaactctagttccaatgaaaaaaagctaattttatttctatctttggctaatctcaaaaaaatgttatcaacaatacccgaaatatctatttcagggtattggctcaatgcatccgcctcatcttgaatatcaatatataactttcttatactccttgacatttcagataaaagttctgaataattcttttctttatccgaaaagagattcttatacatcaaaaacaagaactgccaaaaaacatcgccattatgtatattggtatgtataatattagcaattccctttccaaattcagatatttctctttcatctaaattttgcttatccaaattgatatattcttcatccatagtgtcagtttttgctttatccagcttatcaataagcctattaaatttttcaagattatctttcacattagaacttatgccaaaatgcatatccgtcaaaagcataaacgactctctaagatcaattttacatccgactattttctgtataggtacagaaaatttttgagatatcatagatgctgatatttgtcttatttccaaaatttgattatgttcgctttttttcatgtgattttctaatgatgccatttcaacatcaatattttgtagctcattatgaatattcttcatcagtccactataaaagctattacctatggtaaaatcatagtttttatagaatagcgaatgttcaatttcaccccagaaatagtttgtaagagactttatttgtaattccactcttactggtttttcattttcaacccatatacaatccattcgatatatgtcaagattgtttttttgcttctctggttgattttctgtgcaaacgaaaaaattcccatcttgtctatatcggaacgacttattccctattcgcctttcatctggcattctatcaattagatgcttataaatttttacttcatcttgatttaatagacaaataattctgacacctattccatcaggtagttcttcaataaattttgctgcatcattatatttcatcatatagttttttctatagattttttctgcaatattgtttgcatctttagaacgtccgctaatagttataccctttacatcttctagtaattcattcaaataatgctcaattttatctataatacatttatattcttcacttttactcaatagaattttcgatgcattttctataaattcatttcgatttgctcccatcttttctcctctatactgtatctccttctcccagaacctgaagaatatatttatccatatttccagcatgattgtacatatccaataatagctgactgcctctatcaatatgtgcctttacatactgcgggaaatattcctcatcagttaaatatcttccttcaacctgttcaataagcaccttgaaatatgtatcgttatcacctgtaatagtctgtctattcaaatccagtccatctgaatctgacttataatcagcaacagatgttttttctaatatagaccacgctattgcatgctttaccaatgtatatggtttgtaatttgttctattttctagttcctcaaagatttcttgtgttctctttgatgtttttaatctaaatatcattggttacacctcaaaaaagtaattattcttaattgtagttctgttttcgttttcgtcattgattaacagatactctttagagacataaggttttactatcttatagtactcctcatttatttcttcatccgtagacagaataattacctgatcactaatattagggaagaacttctctgagatttctctcctatgatttgcatcaattctcgcatacggagtatcaataataaacgggatattctgtcctgatatttcaattatcgcccaatataatgccaagataaaaatctgacgctctccctttgacaatctccccaattcaatcttcttatacaatcgaattggttcctgcccaaaatcagattcagacttattttttagcacatttattgaagtagcttccaacattttgactagtcgcttttcacctttagtaccaataagatttgtaaattccgaatcacccaaattcttatatagtgtcaaaagttccttgccattgtattcctcatcttgatacaaattgaaatcaaaattctttccaatttcaatatgcgttatcaaattattctttctataaattgacttcagttttttaacaatagccttttctagtttccttcttatactcacagtcttctcttctaagaactgttccatcatagaagaaataccggagcttagctcgtatacatgcctattctgagcatttgatttaagaatatgcatagatttatctctagtttgttcttgcatctgcaattctctatcaatttcctctaatctatgttgtgaatcatacagtatacttgataggtcatcttttttctttaaaatttcattttctctctgagcaaattcattaatgtcctcctcgctcattgattttttcaaaattctattaatttctgctgttctttcagaagctgccttccttttattgaccagatcaaccattgctgatacatcgaaatcatccaaagacgatacaattccatttactcgaccaatatcctcctttgatagatcaaacatcatttccatgtcttcacggaaaccttttggtctaaatgtatccaacagatgatccattaactgatctacttttgcatcggacacatcaccttttagtaaatcagatattgcatctcgtttcagcttactttgaacgtaataaaatatctcacctttttcttcaaaatctaattgtgccataataggatcagcaaaatctcgcagtatataaaatggcataagcccttccacaaacaacttaatatttgtaagtgattccgtttttatcttttcagctaaagcatactcatcttctaactgttttttctccttacgtgaaattcctcctgcatttttaaaagcagtcgccaattcagtaagttgaatgtcaatgttttctagttcttttgtcaaattgcctacttcgatatcaaggttttccttttcggtttctaatgtttctatctgctgctttgccgattcatatgtgtcatagacctcatcgtcatcattagaattgttctttgctacatagccacgtatgaatttacggataatttcaaacacatccattccgcacatggtgaatactgcatttctaacatatgtgttgtatgcactggtggagaaaatattaccaacctcttctccgtcaaacaaaaagaactcaaacagatctggaggaataatgctacgcaaatagttctcaaaatatgataattcttgatcgttcagtagctttccatccctttctactgtgtattcctctgtaagcttttgattggtataatcccattttcttgttatcacataatttctaatatcacgctcaatcttaagttgtagcgttaactgtacttccgattccacaacctcctgttgaaatgcttttgaattgattaaatctttaattttagaaatgtaatgactatttacacctacatatccatatgctaatggtccatacaaagcaacttttattgccgtaaaaagagaagttttacctgccccattttttccaccaatgagtacaatgttttttccagcatctgttatctcgaaatcaaattcattattaccctcataggagctgaaattgtgtaattttactttattgattttcattttcaatctcctctattatttcataatgtagccattgctgattcaatagcctatctattccatctctaagtattttttgatttgaatagtttttatttcgataaaccgataataacagattgcggatcaattcctctggcacattatttttttgagccagattttctaattcaacaacagtttcattatcaatcaaaggttctttatagtcataccacggaagtcttttccctgttatttcctcatataattccactaaaactcttcgagataagtctaattcttgatcccagatttcatctattgctttcagttcatctaatgttataagttcatatcccataacctgttgggtttctaacaactttcgaagaataagttttcttgctttccagttaaatggaccgaatcccatattaccttgcttatcacgatataccgttccatttcttctctttttctctcgatattcttcattatctcgtatgctcataagccaacttctaaattcagcaagtggtatcaactctctatgtccactctttataaatccatttaacgacttatcttctttaacaactgtgcatacccagcacccaaaacgtgaattaccacagctctgtgtctgaccacctgcatgaataccagcaaaaggacattctccactatctgcatccgcataaagcgataccaactcgctattatctgatccccaaggtgttcttccgccatcacacctaagtaaaacatcccatacatcatctgttgtaagttctacaatagggttataaacatatgcatcctgtatggtttcatgtcgatttagaagtctatttgcaagttctctgccttcaattcttctctttcgtgctatactttctgcttttctgactccaagaagaacaactacttcttttccttcctcatcaataactctttgaatatattcaccactaggatttatttttaatctatctgtacaccatctgaatgttccattcattctaggtgtagggaatcctcttccaattacatttgcccaaaacgaattgtttggtggaggtgtaaccatagccgactttattggtagcccatctctatctgctgcctgtcccaacaaatcattcattttacttaaatatatttttataagtggattttcaattagagtatccgaagatacaatataaacatttttatgtctatcatctggatctaatcccaataacatcttataaacaagttctaccacggttgtggaatccttaccaccgctatatcctataacccatggtctgtcatcagacttgtagacatacttaatttcttcaattaactcctcaagcgtattttcgttaaaataactattcgccatctttatcacctctttgttgagccacttcgtttaacaaacgcaaactcagctctttttttgtgtcgtccatagtttcaacgacatttaatatctgctgttcatagctgctttcctcagtgataagtgttcttctaccaataagttcatctaaagaaatcttgtacaaatcagctgcaccatgtaaaaattccacatctggtgccgtggtattcctttctatgttactcactctttgttgagacaaattgagagcctctgctaattgtttttgtgtatatccatatttctttcttaattcagataatctgcttccaatttccatagaaatgcccacctttccaattgtttattgtactataattaagcttttttcacaataaaattttgtatttccactcttgactaacattttttttgtattataataaaaatacaaagaatttgttagttcaaaaacagaaaaggaggattaaaacaatgtttgtttgtaaaaaatgtgataaagagtacgatgaaagcatgcgttatagtcgtgattccagatactgcaagaaatgtggagaagaacgtactcaatatctcacttatcgacgtgacactttagcttcattgcgttctatgcctcttgaagccaaaataattcagacaaagtatcttattaatcaagctgttagaacttttggagaagatcactgctacatatcttattcgggtggaaaagactctacggtgttatctcatattactaaacaattataccctaacatattacatttatttgcaaataccactaacgaatatcctgaaaccttaaaacacatccaatgggaaatcaaagaaaatcataccaatatcatgattgtctatcctatagattctaagggagaaatgtggaatttcaaaaaagtagtggaacactatgggtatcctatgttctccaaacgcgtttcaaacgccatcagaacatatcaacacgcaaaaactcctcgtaccaagcaaaactctattgattacatagagcgcaacttcaagaaatatcaaaaatatatggaattacctatttctgataaatgttgcgacaagctaaaaaaggagccacttcgccgtaaagcaaaagaattagggatgaaatgtgttatattaggaatcctggcatccgaaagttaccaacgtgaaaaagcatggcttgaatatggctgtaatgttttttatcaatttaaagacaaccaatgtaagccactctctttttggactgatgatgatatcaatgaatatattgaaaaatataatgttaagatcccagatttatacaatatgggttatacaagaaatggttgtatgttttgtgggttcggagttcaccttgaggctccagaatccaatcgttatcaaaaactgaaagcaactcatccaaagcaatattcctattttattgacaattttggcggcatgatgcttcagtttgatatagttgtatagtaactatgcatgcaagtataagcgagaagagattagcaatttttctcttttcgcttgcattaacagagagtcttctatagtatcctttgcttataactactctctaaaaaataacagcctttcttactatatcagccttttggaatttgaccatcgacatacagaatgtgattaactaaccactctgtgagatattttaaaattcccataatctgttcatcttgatcttctacctcatcattgtgatgttccataaattcatcaagtttatgtataaattcctgatgttgaactttctgtgtaaatatcttcttataattaatagattccatatactgctcttcatcactaaagtgttttactgtataatttcggagattttctaatattatatcaatcctatcatatttatccggtgtaaactcatcaagaagcagttcatatgcctcatctgcatatttaaataactgcttgtgttcttcgtctatcatatctataccgatataatattctggtttcatttcatacataaattaatcctaccttccgtttatttgttttatgaacctgttcaatactattcataacaggcaaatgcatttctcatgaatttcctatattttctcgtttttaatgttagattccaccaaaacattccctaattttcttggaaatatccgaatcaacaaaacctttctgcgccatgtcatcgagtatctcacacgttttttcgtgcgataaacctttcttatatggtctgtcctcggttaatgcctgataaatatcaatacatgccataatacgttccggctcatttaattcagctgcggtttttccaaaaggatacccttttccatttaacttttcatgatggaaagctgcccagtctcgtatttcttcaaaatcattaacctctgataatataaggtatgtatagccagcatgattcttcatttttgaaaattcatcatccgtaagcttatccggtttttccaaaatttcattgcctactgccatcttcccaatatcgtgcagtgcaccagccagataaattttttgcacattaatagaatcatatccgatatattgagcaaaaaaagctgctttttcagccactcctatagaatgtctgcttgtaaaagaagatttatagtctacaatctttgcaaaaaaatctgcgacatttttacacgttttccaatcaaaaacctgcttttgtcttgggataatctcccatagcttcatttcaaaagaattatcacgtaaacatataaatgattcagaatgtgtgaatgcatgaaaaaaggcattcacacattctgaatcgaataatccatccctattttttaaaaggtactgacatataaaattccaactgttatttccagatcccgtattatttcctataatatcaatggtatctgcaagatgaataatccttgcaaacaatggaatttcattccactttttttgaaaaggaccggttccatcggcatgttcatgatgatacaaaatcacatttgacacatctgttttaaatggaattttagtaatatttttttcaccataaatacaatgaagatttgtttttttctcggataaatcttttttacaattaacgacggaatcctttttcagttcttccgaaatatattgtgtcaaagcattatcatgcagtaaagcacacatggctaaatcttgtaattcatcaccttgaattttccaatattcagccatgcatatacttatataagccactctttttccatgtttgtttttgatatttaccaactctgcttctatacagtccaaagcataagaataggctcctgcaagtccgatgatatctatacttagttcttctttcattggtataatcctatcataatacatttatgcttctgagaactggtcttttcctacagagcatccgttatctttttctgcttctttagcggtcaatataaacagtccataactcaacttatacattgctttcctatccatgctgttcctcgtttaccttctccctgcatttcgggcaaatgcctttaaatgaaatatcataatccacaaattcaattccatgagtgttatgaattctttccagcaaatccggtatttgatccatatccacatcaaaaacttcaccgcactttatacatcttacatggtaatgatttttcaatgtaaaatcaaatcggttcggtccatccggaacttcaacctttcttaatgcaccttcctctaccaatatatcaagatttctatatacagttccctttccaattgttggatatgcttcttttataaattcatacacttcatttgccgtaacgtgtcttctcatttcgtatacggtatttcttacaagatctttttgaatggtatttctcctacttgtcattttcctccttattaggattagttcttaataaggattgtataccactatcatcctgttgtcaataaaaatagtaataattctcattattataaaagcttccaaactgagcatctttttcctgaataactattttatttcgcgttcaaatacatattctgaatctgaagataaatcagacctaaacgaatatccgagtctgtcaaatttctgaatctccaccggattttcaatattattttccgctatgaatctgaccatttcaccacgagccatcttggcataggtaccttttgttaccaatttatctccggataactcacaaaatacaatcgtaatatatctgtcctgtgatgtcagatacttttctatacattttgagtattcttttgatgcaagattaatgataatcctactgtcatcgattactgagcggtataacaattctccccagtactcatacagattttttgcatctccaattccaacctttgcctgcatttcaagacgataaggagtcacaccatccattggttttaaaatgccataaaacgcagacaagattcttaaatgatttttcaaatactcaaactgctggatttcaaacacagatggtgccatatattgaaatgcaatcccttcatatgctaaaacagccggagtaagcctgttataaagatccatattttccaatctgttaaagttctgctctgcaatcttgtcattacatttccagatagctttcagttcttcttttgatttgcttttcatccagtttaatacttctgctgtcttatcaatatagacaggcagttcaaccggtgctaagttatcggtatctacaatcatcttttttgcaggtgataaaataatcttcattatgccaattccttaagcatattttcaggatcatctgccgccttgactttatcatttgcctttataatgattccctgctcatcaataagatatgtagttcttactacaccaatagatacttttccataatttttcttttctttccagacatcatatgcttcaataactttacgatccggatctgctaatagcgtaaatgccagtccgtatttttcttcaaatctcttgtgagacgctacagagtccttgcttactccgagaataacagttcccttctcagtaaactgtggataacgctcagaaaagccacatgcctgcttcgtacatcctggtgtattatcctttggataaaaatataagatcactttttttcctgcataatcgcttaatttatgcatttctccattctgatccggcaattcaaagtccggtgctttttttcctacttctaacatttactattcctccgcttttgtattttccacctgttttcttgttcttttattacctgaaatcattttatgaccagaatagactgccataatcatgcatatcagagagccaaatgcaaagtatttgtgtgctgcttttaaccctttatatcctgtataaaaagttccaaccattgtaactattgctccgattgaccaatatttatgtgctttcatgatacacctccatattttattatcaacatcataatacaacaatttattatttttcaacaccagcatttttcatagttttcttttaagtcagcaaccaccagttcaactggtggtttgctataagccctccaaagggctatgttactactcgccccaaagggcggtgtcacaaacatttttactggtccgctataaagcggtacttcttgaatcttcttttctcaattcttctgcttgttcttttatatacttctgtactgcctcgtctgtgatattaccgattgtttccacataatatcctcttgcccaaaatgctgctttatcccacttactctgtaactctgggtgacgatcgtatagcattagggtgcttttaccctttaaatatcccataaaatctgagacacttaatttcggcggtattgcaacacttaaatgcacatgatctacacaaactgctcctgcaattatttctacatttttatatttgcatagtgtatttaagatnnnnnnnnnnggggaatgaaaacgatgtgatattggcatttccatctagtgtgtgatatgcttttattgtccacttggaccagctcctgtgttgagtttggcttgcgacaccattctcaatataccacaggaggtttttcttttttatcctcaccgtttccaactattccattctccccagcatagctgggggattagacttttcatttatcaaatttgtgctcagccaaccattgcatttcgctttttaggttaagtaacaaatcaattacaaaaatactctttagcgatttttcctccgttccgaaatccaattgatcgccatgacagattttatttctcagcgggttatgatcacgatattcttccccatgactcgttagcactacattgtatatgtaatcagtcattgcttcccaataaaagacagcattttctgtcattgcagccaacctcaaaatcatatgcttttcgcttgtcttcgcaaatttcttatgattctgaaaatcaatctggtagagttcacaaatctccttctcatcatcttccgagcatattaagccattttcatctgtataatttgaaatgtcacaaatcagaccatccacttgacacatcatgatagaagtcgcaccataatagcatccagagttgtgaagattaactgcctcctccaatagcagcaatctctctgaatcatccttcaatagtttcctccatccgtctactatattatctaatttctcagaattatagtaattgcagatagatgcagccaattcatccaatggatagttttcttttttatccccacatagacccgtaatgatttcttttaattcctcatcatcttcaagaaatagtggccatgtaatgctttttaacgtatatagatatcttaggttacctagagtcttaaaaaatgactccggaatctcaattttaggaattgtagcagtgatagccgcaattgttttacctaacgattctagtgctggccgaacggattccattatctgttgctgatattcaaaaatggggcggatagtctcactaattctacgagcgttttccataaaggtttgcgagataccttgatactgcttcatacaatcagcaatttgttttaccgcagaaacaactcccggatatgcttctatggagcgggatgcaatctttgcagcatctgataaggcctccatattttgaatataaacagatggaatagtatcctcttcctcttcgcccatcgcccacagtataaaatcaatctttttggtatcactgattgatgaataatccggaaaacgactatcaaaggatgttatatattcgttatagcttgccttgtttgccttaagatcactataccattgtacaatgacatcatataactcaattgtttcctcgagtttttgctgtcctcgtttatttgaagatttaattccaattctatcaagaaccttcgaatcccaaattggcatattctcatctatagatgccagcatcttactcgcaaaggatgcctcaacttgtccggttccttcgtacagttccgttataatttctttgtaggaacaattcttctttttcttcctttcgaaaatctcaaagaatactttccgccattctgcatttcgtctaaccttgtaaaaaaagtcaaattcccgctgaaaatcttgatcatcggcaacgttaaccgtctttactttgctcataatattcatatagtgttgaatatcctgtgcccttttttcaagattatccaatgctttctcaatgtcatgattcatttattatccctctgatcaatcctcattccacattcttcgttcttcccggcgacgctcttcttcctcttcttcctcgcggcgatactcactgtcatcccagttataaacgcattcaccacgatctatactgaagccgtctctttctatatattcatattcaccggaatcataattgaatgcatattttgccatgtcttatttctcctccaaaacaaatgtcagcatatcatatgctgcctgtttcttcgcatctttcttagacgaagatcttccattggttacagtatctttttcttttatagagcatttacaattccaaaccggattaccatcttcgtcatgcgtttctttgaagtcatattgagggatggagaaatagcctcttctggcaaggatctccaactgcccgatggaatcattataattcggatcatcaatctcatctctaatagaaaagagcatatcctcatctttcagatattcatacgccaatctcgatgcgtccatcctggccagattctttgatctaccgtatccgacgaaatgataatcaattcccggtatttgaacttcacacgcaaagtgcgtatcctgctccgcttttccatatatacacatatgatgccttggcatataccatgtaccctgcatggaagtaggatagaaacagtgaagtggaatgtttcctgaattagccgatgaccaagcttgtatctcagccacatagtttacgtcttcatcaaacatgagctcgcctggattcagcataacattcatgctatcctgtaatgcttcaatatcccaatttgaatccaaggctatcgcaccaagaatcgcttcaaacagatcctctttaaccgatagtgaatcctgaatgtttttctcgacatctccttttcccattatcagatagtaggctatccctaagttgtcgattgcatctgcaagagtgttcttttgaaccaattgcttcttaatctcagttaattctccctcatccaaatcagaaataaaggttcccgtttcctcggtcttaccccacttttcccagttctgatacttctttgaataatggccgaattcctcggagagctgcttcacgacaacaaaatccaatgccttgtctccgataaattcaaggacctcattatcctgtcctccattttccattgaataggagcgacgagtaaatgcttgaacaagcagctcctggtttttgaacgtgtatccaatttgatcttggataaatttgatttctttctcgtccataaaaaaagacctcctagtatttatactaaaaggcataaagatagtctggcagaaaatccacgtatcccgggtacgctgaataagccagacatgatagattaaatttgattccttgttcttgagagtttaccgatgctcactttcataagcaaagataaacatgcataaacaatgtctcatatttaacttattatgcctttttcaagtaaagattaacacacgtcaaatagaaacacaagatattataaaagcatttaagggttcgagacatgctcaaacccttaatgtatacggatttcagagtgcgccaattttttcaatcagcatatcacaccaatcctgcactgttatgacagccagcaaaagagccttgatagctgcaaagatcagagacataagaaagacatctgaccatctcttgcagacaaggtaatatataataccgcctcctgcaatcatagtaagaagccccacgatagattcagtgagctttaaccgcttctgcatcagcctgtgtataggtaaccttgtatcctgcttccggtccgtcccgtactgctcctccacggtcttcatagctattgctcggaagtgccttgacataatcttcatctgctattgctccaagatagtcagatgctgcctgaaactggggatagctcataccatcaccaataaacagaaaacatatttcggtgcttttgctgtttcttcttgcgtctgcgtttctgcagatacttctgttacgattgtttcctgctctgttgctgctgtactttctgtctgtgccggtgacggtgactcagaagaagtctggtctgctgcaggtgctccggagcatgctgccatagacattgccattacaacagcaagcatacccttcatcatactcttaattctcataatcgtttctcctctctgaaacatgttttgtttttcctctgcttcactatacaataccgttgtaaaaaccaatgtccaaagtaggaaaaatttgagtaaattccgacacttattttatgcagttctatctttatgagatttcatcaacatcataatacttaaaatcccggaagcaggcacttcctcctgtttcctctgccgcatagcagaacagaccaaaccggcaaccagtaaaatgatccagtttgaagtacagcttatgcacggttccgatgggtagccagtctcccttatttacccggtaatagcagcgtgcttcatccttcatgttacagaaatctgcttcaagacgaaaatccatctggtgtgattcaacaatagttccttccgtcatatccaatataccatcttcttttttatccagcataaggacttcatattttccatgatgttttgtaatgccaactgcagcataacagctctgcaacgcacacaaacctgcgacatcgccctctttcaatgcagaagcatcaacagtaacctcagctgcgcaggacggataactcatcctttgcgtaagcgtatttactgcctgtgtaagctctgtacaaacttcccgtgttgtaattgtataggttccctgcaatgcatccagatgatagtactgtggatctggatcatgattaaactgccagcgcggaagcagcccattacagaaatcatcacttcccactaatggctgataaatatatcctggtctggtactgtgaacctctatttcttccggcacatgtccgttctgtccaaaaaacggaaaatgatccttccaggtaaccggaagcagaataggaatccgtccaactgctccgaaatcctgaaacagcattgcataccactttccatccggcgtatccactattcctccctgtgccacgccctgtccacaatatccacgatcatcacaaagtacatctccacccgtgaattctccttccagagaatcactgtaaaagcatgcttccgtccgcatccagcggtctctcagggaatgaatcagaaaaatataataatagccgtttattttttgaatatgagaaccctcatagcctagctccgggttcttatgatcactgactaaaagacgatgtaatccgtccttctttggtgcagtcaaatcttcattcaattctgtaatccagatttcatcatttccatatacaatatagtttctgccatcctcatcaaataataaagagccgtcatgataaaagccttctatcagctgctttttccatggaccatctattttttccgaagtatacaaataagtcttacgggtatcatttgccacaaagcagatacaaaatcggccttcatgatagcgcagggaagctgcccacatgccctgtccgtaaatattctgaccgcttttcagttgctgcgcatccgtatgatccaacgtctcatagacataagtcacatgctcccagtgcaccagatcaaaagactgcagaatctcacagcccggcataaagtgcatggttgtggataccatataataggtgtcttctacgcggatcacgtccagatctggataatccaatcttgttataggatttacattcattgtttattcctttctgttttatctccatattctttctttgttctattctatttttactattttatctttgtttcttatccgtctgccttttcaactcttctctgccccatttcactattgctaatatcacaatctcacagtaaaatataataatcgaaaacgatcctgcaccatgttattcatcagaaatttccggtttgcacagatttaccgggaataaacagaaggagaccagcatgaaggaaaaccgttttgtcactttcattatacaagctttataaatcttttccaatatcctcaagctctttcatagcatcctgatttttagaaagctcatcctttgctgttgcataatatgacttctggaaaagcaaatcccatgaaagatattttgccatacagtcaaactgcttatcaatcaactcatactggatactgtcaactggagaaccgcctacaacaatcgtgccaacttttttattttttaactgcattccccggcaataacacttatcaatgataagtttcaattgtgctgacattccccaccaataaaccggtgttgcaaaaaggatcatatctgcggcagcaattttatcaattgtaggatttgtatcatccttatctacacatcccttagaacattgacaggcaccacagcccttgcatggtgcaatattaagtttgtcaggttcaatgatttcaatttcgtttttttcagatgctccttttacaaaagcctcaatcgctgtaagagtgtttccttttcttgcacttccatttataatgattactttcatctcgcaaagcctccattctgcttatcatataagcaaataagttctaaataataatttttctcacataggcacattataccatagtaaacatgcctatgcgataacatttactgcttcttccgatatgaactcatcttctccacagttacctctggatagaagtaagtaagaatcgttgctttgggaacgcctgcagcaagagctttcttcacttcctctttctgctccggcgtatatgaccaatgcaacattcggtttgtgatagtatcctcccacttaggcttttccctctcaggattcattacaggcttatttcaattgttcccataacgcaaaaagagaacatcttctaaatttctttagaaaatgtcctctaagtaatacaatctttaatttttcagactaagcaatctgtactaacctgtactaatctttttttgactatgccaaaaattggtcaaatcttggtcaaaaccccttgaccaactatatattttagtacatccaagtgctgaaacccttgattttcctgcattcttacttatcaatagacttcattgtcgggaatatcgtccaatattgcgaatatgtccttatatcttattatatctgtatttccgtccttctcgtttatgtctctgattatataaatctacacttatcttcataagtggtcgcaaatcagtcgcatactggtcgcaaagttttatttattcactaattctggttctgcataatttgttaccattatatgcaatctactgtcgagagtaagaataaatgtctgttgatataattgtgcagacatatcttcaaactttacagttattgaaaattgaaagtctcgtttcgggctatcaaacttccatttggtctcacacaattcattcaccataactatagggtcttgtattggttcttctcgaaatatagtatttccatttgaagccgttatttgcgttacaggctcaattttaaacgccgaaccatttcctttattcctaaaataaattgtcatatgatggtcactatttccattgcacatacaggtagaactcttatcaacaactaaatacggccttttttgtattcgtataatttccttatcatataatttttcttttttgtattgttcttcttgctgtttaagcgctttttctgattctttaacttgcttattggcattatggcaagtaattattattgtcaccagactaaatatacttgttgcaacaatacttagaatagaaattgttaactttactatttccaaattgtctagattcataattattacatttctcctttcttctgtgcatctttcagcctatcaaaatattcttcaaaattgataagctcggatttcttcaaatccttagtagcttctgcataaatctgcatcgtggtttctgcatccgcatgtcccagaatatcctgcatggctttaatatttacacctgcttcacacattctagttgtaaaagtatgtctcaaagaatggttgctaaactttggaagaataaccgcattgtctcggtggtctttataaagcacctcgaaattgcagtctctaataattctcctaagagctttattaagcgttccttgatgttgaacattaccaaaacgatttacaaatataaaatctcgataaccatcaacaacagcttcactcttaattccacattcttcttgatattccttttccatgatgaaagcttcttttacaattggaagcataggaattgttctctcacctgcttttgtcttagtggtattgattgcgaaaatctgtcctgcctctgttctggtgcagtgatataccaatgtatgattcacattgattacttcttcctctaaatcaatatcacaccatctaagccctgtgatttctccaacacgcatcccagtccatagcataatagtaaaaatcggataccatctatgatactgcccctgcttgctaagaaacttctcaaataactcctgctctggaactgttaatgctcgtctcttttcaacctcaaaattacgagcctttttaagttcttttaaggcattgtcagaaggattatatctaagataatcatcctcaactccaagctccaatacttgatgcaatacagtatgtatgctgtcaattgtattgacctgtacatttctttcatctgctagatgattataaaatcctctaacatccgaacgcttcaaatctacgatcctgctcttgccaaaatctggttcgacaaacatggtgtacatgtatttgtaattagaaaaggtattgtccttgagacctctcttaagctgtacccaactattatacaaatcattaatcgtaagattattcttatcaactctgacaccatctaaaacatctcgaagcacatccagttctctttctcttaattcctcaagagtgactgcactaatagagtgccgacctcctcgcttgtctctccatttgaactcataagttccactacttctctggtattctccttccttcaaaactctatttttattatccttgcgtctctctactgccatgtaaaatctccttcataacaacaaagagaacatgctcaaactcattataagctgtacatgtcctctttgtctatcaatgaaatataatttatcggaattaattaaaaatcatttcatgctttatttttcctatatatttggtctttaaattactaagttcctcattttcttgaaaaaagatataactatatatccttccagtacagtctttgtcctcactactgattatatagcatatataatcagcaaatttgattattccagtatgaaaaatatccatatgcgtcccacatgtattaaatgcttcatatttgcaaagaaacgtatgtaatttatttattttctcactatggcccattggtttttctaacatatttatattattttttatattttgtaaaatagtatctgatattaatatgtcattaaactttaaattattcgcatcgtatttctcttctaacacaaactcttgatgtgttttgatataagtttcatctatatcgtacccacatttactaatcaatttcattaccaccatactgctacgtatattacttcctgctgaaatgccatttgatatttctattacatcctgattcgacttttccaataatagtttatatttatgttctccagtatgttgcatttctactctttttatatcactaaatatccctttattttcctcatagaattcaataaccttttctggatatgatattttttttccatcatcagaaaataaatttcttttatattgaataaagccattattttcttcacaaacactcactcgttctctaatcgaaactggtattttattttttcctaatatgatatgtgcaagatatctatgttttccgttctcgatataataagcatctccatctttcaatacactgataggtctacattcattttttacaatataagatatactgttcaaaactctttcataatttgaatatattatttttctgctacaagatgtatttgtttcacttatcaaatttatatctatttcatcataatatggcaaaccataatttgcctgcaaatcaattttttttacacctctactttctacataaatcaatggaagttcattttcttctggataacaattttcaattttcattcgacttctataactctcaagcttatcaacattctcgcatatatacataaaattatctctcctttatacaatttatcacaaagaatatctctccatacaaattataccagacaaaaaatatcctctatgttaaaacttatattgaatacaacttttctaggtattctgtgaataaccttctttttatcaatctcttgttaccgcaccagatgacataaggacaattatcactattagttaattccctaagcttattctgaccgattccaaaatatagagaagcttcctcaagtgttaagtttgctttttcccataacggaacatattttttatctatatcagtcagcaaccaccagttcaactggtggtttgctataagccctccaaagggctatgttactgctcgccccaaagggcggtgtcacaagcatttttactggtccgctataaagcggtacttcttgaatcttcttttctcgattcttctgcttgttcttttatatacttctgtattgcctcgtctgtgatattaccgattgtttccacataatatcctcttgcccaaaatgctttatcccacttactctgcaactgtcaatcctagcagaaaggttttgggaaagcctgccagagagggtgaaagccccgtaagcgaaaggaaagatgacatggcggtatccagagtacatcgagacacgagaaaccttgatggaatgagcggggaccaccccgtaagcctaaatactccttagtgaccgatagcgcatagtactgtgaaggaaaggtgaaaaggaccccgggaggggagtgaaagagaacctgaaaccctgtgtttacaagctgtggaagtgctttatatgcacaaccgcgtactttttgtagaacggtccggcgagttacgggtaccggcaaggttaagcacttaaggtgtggagccgaagggaaaccaagtctgaatagggcgtcaagtcagtatccgtagacccgaaaccgggtgatctacccatgtccaggttgaagttgccgtaaaaggcaatggaggaccgaacgcacatccgttgaaaagggtggcgatgaggtgtgggtaggggagaaattccaatcgaacccggagatagctggttctcctcgaaatagctttagggctagcctcattttagtcttatggaggtagagcactgaatttccgcgggggcgtcaaagcttaccaaagaatatcaaactccgaatgccatgtagatgatgaatgggagtcagactgcacgagataagttgggcagtcaaaagggaaagagcccagaccaccagctaaggtcccaaagtgtgtgttaagtggaaaaggatgtgggatttcaaagacaactaggatgttggctcagaagcagccacacattcaaagagtgcgtaacagctcactagtcgagaggtcctgcgccgaaaatgtccggggctaaaacacaacaccgaagctgtggaatcacgtagtgattggtagaggagcattcttaagaccgacgaagctgtaccggaaggagcagtggagggataagaagagagaatgccggaatgagtagcgagagagaggtgagaatcctctcggccgaatatccaaggtttccagagtaaagctgatctgctctgggtaagtcggggcctaaggagaggtcgaaagacgtatccgatggacaacaggtttagattcctgtaccacatatgaacagaactgtggggacgcatgtggagagcacgagccgggaatggaaataccggtacaagcggagaaggagtctggttggcaaatccgccaggcaatccgaagacgtgatgtggagcgaattagagtagcgaagcgtgtgagccatgtgccgagaaaagccgctattgtttcatgtgtgcccgtaccgtaaaccgacacaggtggatgaggagagaatcctaaggccggcggaagaagcattgttaaggaactcggcaaaatgaccccgtaacttcgggagaaggggtgcctgctaacgcaggccgcagagaataggctcaagcaactgtttagcaaaaacacaggtctatgcgaaaccgaaaggtgaagtatatgggctgacgcctgcccggtgctggaaggttaagaggagaggttagcgcaagcgaagctttgaatttaagccccagtaaacggcggccgtaactataacggtcctaaggtagcgaaattccttgtcgggtaagttccgacccgcacgaaaggcgtaatgatttgagcactgtctcgacaatgcatccggtgaaattgaagtaccagtgaagatgctggttacccgcgccaggacggaaagaccccatggagctttactccagtttggtactgggattcggtactgcatgtacaggataggtgggagactaagaacttgggacgccagtttcaagggagtcgctgttgggataccacccttgcagtattggatttctaaccagccgccgtgatccggcggtgggacaatgccaggcggggagtttgactggggcggtcgcctccgaaagggtatcggaggcgctcaaaggttccctcagaatggttggaaaccatttgaagagtgcaaaggcagaagggagcttgactgcgacaccgacgggtggagcaggtaggaaactaggacttagtgatccggtggcataaagtgggattgccatcgctcaacggataaaagctaccctggggataacaggcttatcactcccaagagttcacatcgacggagtggtttggcacctcgatgtcggctcatcgcatcctggggctgtagcaggtcccaagggttgggctgttcgcccattaaagcggtacgcgagctgggttcagaacgtcgtgagacagttcggtccctatccggcgcgggcggaggatatttgagaggagctgtccttagtacgagaggaccgggatggacggaccactggtgtatctgctgtcgaccaacggcatggcagagtagccaagtccggaagggataaacgctgaaggcatctaagcgtgaagcccccctcaagatgagatatccctcacataagtgagtaagatcccttgaagactacaaggtagatagggcagaggtggaagcacggtaacgtgtggagctgactgttactaatcgatcgagggcttgaccaaaggagcatcctcggcaaccggagactatggagcatcctcggcaaccggagactatggagcatcctcggcaaccggatacaagggagcatcctcggcaaccggatacaagggagcatcctcggcaaccggcacctgtggagcatcctcggcaaccggatactgtggagcatcctcggcagaagacaaggatgcagtagctgttgcttggggttacaaatcaaaagccaagggcgttcttggggcatttcttgtttttgcagactgggaatacactggttcagaagatgatacagaatatgacagaaataaccagagtgcatgggttcttaacggtgcaaaaatggtgcaggttgatggggaaaatatcaagccgaatacttggtatacgattgaaaatggagagattgcggaggtatcagaatgaattacataaaagcaaaatatccaaaccagagccggtcatatatatttgctacatcagacgatgtaaaagccggagacatggttttaaatgccaaatgtgcgaagctgacagttacggatgaaaccgtggatatgaagtgggtagaaacctacggtgctgataaggtggcagttgtgaagaagtgtgaagaaccggaaagcggtggtgacgatgagagttaatccatgtagatattgtgcattgtctgtaaaccttaatggaaagcattgttcaaggtattcttccgaagagtgcgcaaaatgcgagaacattcaaaaacacagggaataccttttaagtcagcgaaaattcgcagagggtgagcagattacaagcattgaggaacttttgaaacaggaatgggtaatgtggtatcacagtacaaagcacatagaggttttcaagaatatgcaactcaatcttgttttgaaatttcttaaaaatggagcatttaaaaaagcaataaggaaagaaagcgaggaaaaataattatggcagagaacacagcagtagcaaaggcagaggaaaagaaagaggaaaagacagaggttgcacacagcaacaacaaggttacagactatagccttggaatttttggaacatcagataatttcattatggctatgcagatggcaaaggcgttggcgagttcaactatcgttccggcaacattccagaagaacgatgcaaactgtctgattgctattgagcaggcgcagagactgcgagtaagcccactgatggttatgcagaatctgtatgtgattcagggtagaccgtcttggagctcaaagtttctgattgcggcaatcaataattccggcaaattcgatatggaattacagttcgaggaaaccaaagataaggatggcaagccttattcgtgtcttgcttggactacgaaaaatggtcgtagagttgagggtatgaccgtggacatggaaatggctaaagccgagggatggattggtaagaacggtagtaagtggaaaaccatgccacagttaatgcttcgttacagagcggcatcttttttctccagtctgaattgtccggaattgacgatggggctttatacaaaagaagaaatgcaggacaacgatttcaaggaatatccgatggaagatttgcaggaacaggtcaagcgtgatatttccgaaaatgccaattcagagccatttgttgtagctgaatccgaagctattgagaccgggagcgaagtagtcgaatcagagccagaaaaagtagccggagaagtcgttgagaatgacgagaacgtgccagactttatgaaggactaggaggttgccatgagagttatatcgcaggacggaacaatggatttcccgtatgataacgctttggtttctgtatataaaggatgtataaatgggcgcgtttatgtgagaatgcagatatgtggatatgatgattcagtagatgttgcagattattccaccgaagagaaagcaaagaaagctatggaaatgcttagagaagaatatcaaaaatatgcaagccagaattacatgaaagtatttcagttcccggcagaggaagaattggagtagcctatggaagttatttcatttttagagtcagttcagaaaggtatgaaagataatatttataaattctgcaaagatgggagatgcagtcaatgcggtaattgctgttccaaccttttaccaatgagcagaaaagaggtagctgctattcacagatatgtccgtaagaaccatatcaaagagtgcaaacatcttcttcccactgcgaatagaacgtatgatatgacatgtccttttcttgatacggataagagttgcgagaaatgcataatctatccggttcgaccggaaatttgcaagcaatttatctgtgacaatgaacagagggcaaagcataatcgggcattgttgggacagacaagacagattattgatgtgaggagtgagttttatcacagaaatggaaaataggcagaaagaaaaaattacaaaaagccgagaacgcgtcaaaaagtttggagaagtttatacgccgggctggatggtacaaaagatgtgcaatatgttggaagatgaaaatggtggtgcagagtgttggagaggaacagtgttggagcctgcgtgtggtactggaaatttccttgtggaaatcttgaaacggaaactgtcaataggaatgactgaaacggaagctgcagagacattattcggcattgatattctggcagacaacatagaagagagcatacagagacttacggatcttgcaccgacagcagaaagtatattcagaaagaacattgttcagggcaactttttaaaaccggaaggaatatggtttttggaggatgccgaatgagagaaaaagcggaagacccttatgtatctcttggtatatgctccagatgtcacaaaggcatattgggaacgcagtacaaaatgtgcgctgagtgccgggagaagaaagcgaaggtagaagctaagagacttgcaagggaaacaccggaacaggcagaagcacggaaagaaagagtccgtaccagatattacatgaataagtccagtggaatatgcgtgaagtgtggaaaacgtaatgcagtatgcggaactgttttatgcaacaggtgtttggcaaagaggcgttcgtgcgagaagtccacaagccaaagggagtaccgggaggataaaggattgtgcataatctgtggtagaccggcggtatctggaagaaagcattgtgaggaacatttaaagatgctacggaaaacagttgcaaatgcggcaagccatatagactacacgaaacatccttggataatcgataataaacacatatttgaaaattgaggtgaaagaggtatgaaacttaaagccttaggctctggttcatccggtaattgctacatactggaaaatgaaagcgaagcgttaattattgaagcagggttgccgtttatggaagttaagaaagcactggatttcaatgtgatgaaaattaaggctgtgattactacccatttccatactgaccatagtctttatagcttacaatatgtgcaagctggcattcctgtttttgaaccatgcagaccgccgataaaagattctgaaatgcgttttagaaaaggaaattttgacataagagcatttgaaaaccgtgacaagtctggaagatggctacataacaacggagacggttcagagtgcccgtgcgttgggttttacattacgcatccagagatgggaagccttgtgtatgcaacagacacggaatacgtcagatggagatttaatggtgttaatcacatcatggtggaagccaactatgatatgcagttcgttgacagggacgagccaaactacgaacaccgcctacgaggtcacatgagccttgatacggcacttaaatttatttctactaacgataacccggcattaagaaatgtcgttctaattcacttatcagataaaagcggagatcccgcactattcaaacaaaagacagaagaaacagttaaatatggatcagatgtttacgtggcggaacgtggattagaggtcgatatgaacctttacccgttttaaggaagcgaggaataagtgaatgaataaagtgattttaatgggaagatgcaccaaagacccggaagtaagatggtcgcagggcgagaagtcaacagctatcggtagaattactctggcggttgaccggaaatttaagcaggatggacagccaacggcagattttatcaattgtcttgcgtttggtaaaagagcagagtttcttgaaaaatattgcaaaaagggaacaaagcttgtaattgaaggaagctggcagaccggaagttacaccaacaaagacggtaataaggtgtacaccaatgagtgtttgatcgaaagctgtgaatttgcagagagcaaacaggcttcgcaggacaacggaagttacaaaccgcagcctatgacagattcggatggttttatgactattccagatggaattgaggaagagttgccttttacataaaaactgatctggataagctaatacagtaagaagggagatatgtatgttattgatcgaggacaaaggtcagaaagagggtcagcacatacttaagaatcgctattttgatcgtaatgacatagaggtgctacgagcacctcttccagttggagattatgttatcgcggaaggaaccgttcttgacgttataagacgaaagtcagcaagaaagatggaagttaagaagatggattttattggaagctacaaggttgctgtagatactaagaaggacatgcaggagattacgggaaacgtctgcggaaaacagcatccaaggttccgggacgagtgtattttggcgcagaacaacaatatagcactgtatgttttggttgagaacatggatggaataaaaactattgaagacgtttttcattggcacaatccaaggcttgagagatacaacaagataaagtacatgcatggtattggaaagtggttgaatgtacctcttccaaaggcaccgccaacaagcggggaagtccttggaaaagcaatgctgacaatgcagcttaagtacggcgtggaatttgttttttgcagaccggaagatgcaggatcgcgtgtcattgagcttttgaaaacagaaaagtgataattttttggaacttgaaggagatattatggcaagtaagcggatgtttcgcatagatttagtgacgtcagatgcttttcttgacatgccgctcacagcgcaggggttgttttttcatttatgcatacgggcagatgacgacggttttgttgactgcgccaataaaacagtaagagagtgccaggcttcaaaggaagacttgcaaattctcattgacaaacattatgttcttacttttccaggatctaatgttattgtcataaaacattggaaattacataactgcattcaaaaagaccgttataagccaaccaattatgcagaagaaaaatcaatgctttatacgaaaagaaatggcgcatacacatttgatgcttcaaaaaatttttccggagtgaatgcaataagaagcgcaggaagctcgccggggaaagaagtggaagcgtgcataccgtcattggcggaagtggctgattattgccgtaagaggaagaatggtgttagcgcagaatcatttattgattactacaaatcaataggttggaaacgtaatggagaaataataaccgactggaaagccgcattaaggagttgggagaagcaggagaaagagagtaacccaagatcaaaaaacaaatttaataactttcatcagagatcttatgactatgatgaattagaaaaaactttggcggaaacaaatgttatggaagggcgtgataagaaatgatggagatgggcgaatgcgaaatttgcaacaggtaccgacatgcaaagcataaaggtgaacagttggagattcttgcggaactaaacgacgtcccaaggcacaaaattattgggattttattggaaaacggagaaaatgtaaaacttccaataagaacaaggggaagaaaacgcaatacggattttacagaaaaagaataccagaaagcattacttaataggctcgatgaattggatggtcaaatttctgatcgtgaaaatgaattcaaagatatatgcacagtcctttttggaactcgattcgattgagatgaaaagaaaggagaactgattcatgagaaataaagatgaagaacttaggcgagagggaatggcatatgctctgcgaattgcaaaggagaatggaattgactctctggaagaagagtgccgatttcgcggcgcaacaaaattaccacttgcgctaccaaagaatgcaatagatgaatgcgtcagcaagattaaattaaataccatagacacggtaacgattttgtctgcaatggttttgcacgatgagtttgactttggtaaaagccgcatacagagatttgttgatcgcttcaataaaaaggcagaatgcatcatggatgattatgctacatgggaagatcagatacagatcttgaaagaagagtgtgggttggattttaaaattcgcagaaatgacactgatgtgaaagtgagataaaggtatgaaagaaaaaatgcgcaactatagcggcgacgcgcttaagagattcagagaggtgccgtatcagctgcggtgcgggaaggagcagggaaatgattgaatgtatgagaacagtagcgagaaagccggagtttggacggtggattccggtaagtgagaggttgccggatccggaaacagaagtattgataactgccagaagaaaatataagagtggaaggtgtgtagatactatcaccacagcgctttacgaagatggcaacatttcggaacgcgatagttgttggaactgggtagacattgacggcgagtatgacgaagagaatgattgttacatcgtcccggaaggatggtgggaaaacaggcactttaatccggatgaagtctacaataatcttgtggatgatgaagttatagcctggatgccactgccagagccgtatagggagagtgaggaaaaataatgggttgcgaaaaagaatgcaagctcggaaaaacatattgttgcatggagtgcccgagcaacgatatatgccgggaaaagcgcaagaacagaaaattgagttttgaaaaagctgtgaagtggattgccgttagcattgcggttatcgccggaatcaagatgacgggatcggcgtggtgcctgtgggcgtttgctttgccggtaatggatttgaactttacggcagatctgaaacgagcaacatcggatcagattcggatcgcgattgaaaagatgcagaaaaacggagggaagaataaaacaaggattgccgcatgtgaaagcgaattgaagcggagggacagagaacatgggaaatagatatttatgccgtggaaagcggattgataatggcgaatgggtggaaggatgttatgtgctcatagacaaccactgctacatatatacaggttctttgtgtaatggcggtttatatgttgttgccgaaagatttgaaatccagattgatacattatgccagtgtaccggatatgagggaatctatgagaatgatatcttccggtatgaagatgaagattatgttatcaaatggtcatgtgattcgttgagttgggaagctgtatccctgtttactgatgaaagcgtttccttggcagagttcaatccggattatatagatgtcattggaaatgagattgacgacccggaactgttggagtgaattgtttccaaaatggaaatagttgaaaggagaaactatgacggagaatgaagcaattgaggttttaaaagattttggtaagcaggtatcagcaaaagcagatggagcatatcagagcactatagggaaaaaagcttgtgatgttgcaattcgatcattaaaaaaagtagccagagagcataagggaatggaactcaccgattactggtggaatgcgttcagaggtagttttgagacagaggatgatgtgtttgattatatttttgatcgtgtggatacatcagattttgaggatagttacatagatgctggtggacatggggattgcgacgaacttgtgaaaataactgcatctgacaagagaaacacgatgtatgatttcatgatggcaattttagatgaagtacagaagtaccgtgcaatcggtactgctgaagaattgcaggatatgaaaagcaattattttgaagcattaagtgattggcgccaatatcgcaagattggaactttggaagaatgccgggcggcagtggagaagcagacggcaaagaaagtgatgcacaataaaaaagtgaatatatatttttgcccgatatgtgaaagaaaatgcaattatatgcacagcttatattgctctggatgcggtcaaaaattagattggagtgatgaagaatgagtgctgtatggttcataattttattcattgcatgggagaacggaatagagattgacaatatgtcatttatgatgattgcaattttttatgtcggagattgcattttaatgcagaacaggagggcgaacgatgggaagattgattgatgctgatgcactaaagaaagatttaaaatcggttactttaagcaatggaactttagtaaatacaaatgcagtattgtatttactagaagaatatccgaccgcctataacccggataaggttgtggagcagttggaaaagaaaatacagacgcatacgcgttgtattgaatatgaaaataaaaacggaacgataacagaagaatttcaacaaagaaaagctgttgaagtgctgaaagatgcaatcgagattgtgaaaggcggtggcatagatggctaaagcagtattggtaatagatatgccggaacgatgtactaaatgtcctttgttgcttacaattccgcagaaaggcgggcttgcactttgccttgccagaccaacgaacggacaggaagaatataatccgaagaacgaaaaaacatggagaccagattggtgtccgcttcgggaactgccggagagatcagatcatccagagcattgcgacaatggaagattcgacgcaggttggaatgcctgcttagatgaaattttaaaataaatcgaaaggagcggagcttcccgggaagatgcgcatcggctccttgagaaaagatgtataagtattcctgtacctgagttgaaagctgttgaacgttttaaactgctggtagaccagaccgataaatcaaaatttgaactcgaaaaggctctttctgagctgaccgcaacatataaacgcattattgcagagaatcttggctaattgatatggtcatgtagtttcctccggctcgtggacaaccggataacggagggtacgaaaaggaggaagcaccatgatcaatcagataattacaaacataaaacaagatttgtcacaaatcctgacaccagatcaaatggaagcactatcgcagagcctaaataagcatctgcctatgctggccggtgacaagtctgtggaggaaaacacaaagcatgatatgcttcctttgtttattgccgcaaagcgtgtggaaggctgctctgaaaagtctctccgatattatgaatcaacgattcgcaatatgttggaggccatcaataagcctgaatgccagatcagcactgaagatttacgaggctatctcgatacataccagcgtcgaggcactgtcagcaaggttactttggataacgtaagacgcatcctttcttctttttttgcatggttggaggatgaggactatattgttaaaagcccagtgagaaggattcacaaggttaagaccgggaaaacggtgaaagagacttattccgatgaagcgttggagcttatgcgtgaccactgcgacaatacgcgtgaccttgcaatgattgatttattgacttctactggcattcgtgtcggtgaattggttaagctcaatcgttctgatttggattttgagaatcgcgagtgcattgtattcggcaaaggtaataaacagaggaaggtctactttgatgcaagaacgaaaatccatttgcaacgttacctgtcagaacgtacagatggtaacgaatctctgtttgtatcccttctgaagccttacgagcgtttacaaattagcggtgttgaaattcgtcttcgcaaaattggtcgtgaattgaactttaataaggtgcatcctcacaaatttcgcaggacgttggctacaatggccattgacaaaggtatgccaatcgagcaagtgcagcaacttttgggtcatcaaagtattgatacgacattacaatatgctatggtcaatcagaataatgtgaaggaatcgcatagaaaatacatcggataatgctgtcagctgtttgcaattctcaatttatggagcagttcggaaaccttgatagcaatacaaaacactatccgatcaaaaagttgagtgaaatcgctgaacgctggaataccgcaggacgggcagcacccgccgctaccaccccggctatgagtgcaagtgggcgaccaataccgttgtgcatatccttgaaaaccgggaatacacgggctgtctggtaaacttcaagacagaaaaactttcttacaaagtcaagcacagtgtagaaaattccccggaaaagcaagtgattttcgagaaccaccacgagcctatcatagacacgcaaacatgggaacgggtgcaggagcttcgcaagcagcgcaaacgccccaaccgctatgatgaagtgggcttgttctccggcatactgttctgtgcggactgcggcagcgtcatgtatcagcagcgataccagacagacaagcgcaagcaggactgttatatctgcggcaactacaagaaacgcacccatgactgtacggcgcactttatccgcaccgacctcttgaccgctggtgtactctccaatctgcggaaagtgacaagctatgcggcaaagcatgaagcccggtttatgaagctcttgattgagcagaacgaggacgggggcaagcgcaggaacgccgccaagaaaaaggaactggaagccgccgagaaacgcatagccgagttatccgctatcttcaagcggctgtatgaggacagcgtgaccgggcgcatatcagacgagcgtttcacagagctgtcggcagactatgaagcagagcaacgggaactgaaagaaagagccgccgctatccaagcggagctttccaaagcacaggaagccaccgtgaacgcagaaaagtttatgaatgttgtccggcggcataccagctttgaagaacttacccctactctgctgcgggagtttgtagagaaaattgttgtgcatgagtgcagctatgacgagaacaagacccgcagacaggacattgagatttattattcttttgttggcaaggtggacttgcccgaataaccgcccgacctatccgacacaatgcgcaagtgccggataggaacggcaaaattttttacacttctattgcttctttatcacacatatggaaagaggaagataccgtgaagatatcttcctcttttgctttttaaagttggttaaagtagtcgaaccatgcggctaagatttcagctctgttttcgagaatgtagcgggcgattttttttagatcaccctgtggaatctggcttttattgtgtgcgagttcgattccgtcagctgtgatccagaattttgttgcgctggatgtttgttgtcctttgcaaacgtggatatgtggtggttctgcattttcgtttgaccaaaagaaaaatttatatccgaggaaatcaagcagggctttaggcattttcaccgcctcctttctgggcgaagtcccagatgagggatgagttgttcttggcgtattttttcagttgtaaaatttcatcttctgaaaagccgaaagatttgtgtacgatttcgccggggagtgttaggtcaaggaaatcaaagccgttgggattagggcgctcgaagtggacttttacgatgtcgaagccgtctttttcgaggagcgcgctgtgggttgttacaatattgtttacagtccattgtctccggtgtgtcggacatgcacccgtcggattgtccaaacgtggaagagacacggaatctgatgcaaacattcagctggaagaaatgctgacatttttctccaacaaatttccatctgcatttccatctgaaatctcacgaagtgatcttctgataatattacttatcatcccaaagaggtctatgcttattgtggcagttcctttgaatgatcgtttctaatccaaagccatgctccgtttctagttccggctcagagaatctctgatctgtgccatctcctcatccgagaagttctcatggctccacatcagaatgtcgttattcttcgcgttctgatagcgtggaatcagatgcatatggaagtggaatactgtctgtcctgcaacttcgtgattattctgaagaatattaaatccatcacagccaagaacctctgtcatatgtcctgcaagcttcttggcaagcttcatggcttttcctgcaacttcctcatcgatatcatagatatccgcatagtgcttcttcggaagaatcagcgcgtgtccttttgacgccgggcttgcatcgagaaccaccttaaatgtgtcatcctcatagatcgtgttggacggaatctctcccgcaataatcttacaaaaaatacagtctgcttgtctcataatatgattactcctttcttacacctgtcgaattttgtaaactggttgttattgaacttcttttgtataaatgctacactaagttgtgtcacgtgttaaatcagaccaacaaggcagggattacattgttaagcaacgaggattaccttcatattttccacgaaataaaaaattctattacgttgataaacagctcccttcagctcgttgaaaagaaacaccctgaagtgcgggaatttgactactggagtgaatccatgtcggaactctgttttctgaaaaacatggtcattcagctgtcctctgcgcggctgtgcaatcaactgaatctgatgcaggtaagcatttattcgtttatgcatcagatcgacacttccatccgtgtactgtcctggaagaactttgtctgtaacttccagcttgaagagaaccttcccctgatcgaactggatccgcagcttttaaaacaagctgtcataaatattatcaaaaatgcatttgaagccatgcatgagagtggcactaccgatgtccacgtcttttatgaagaaccctttatgagcattgccatcactgaccacggcggcggactcgacccggctctggcggataccatcttccagccttttattacctccaaaacgggaggcagcggtctgggacttgtcattacccgtcagatcatcgaatcacaccacggtacattaacctgcgattccagaccgggtgacggatgcaccttcaccatcgcacttcctcttacgcaaaattgaacacggtatccagcatccgcagaatcttaaaattgcccttcgcagtcatctcgcctgtcataaaggctctctggaatgtcatcctcccggcaatcacgccatccattacttccggcgtcagttttgcatagatatcaatattctcttcctgaccatattgtatcgtgagatcctcatctttcacttcaataaaaagcggctttttcttatctgcaaacataaacagatatctggcatgaaaatcctgctgcggaacaaacgcattgcgcagctgatcgatataggctacatcctcttcctggctgacctttccaagcatatccttgaacatggatgccagttcctgaatatcttccttctgcttcttcacatagctgtcatccgatacatacttggacagctgctcactttcctgtggagtgagttccatctgcggtgtgcgcagcacactctgtctgaccgcgaggttactgttcgggagacttttcatcttctgagaaatcgtccggtagagattctccgccttcttctcaatgatgaccgtgtagtccttgttcatctcaaacgacaccagatcctccacatatccgcagagtcccggacacggaagcccgccgagaatctcccaggcatttgccagcgtcatctcaccctcacgctccccgtaggtcgtagacatcacgatcggctgcatataggtcgtctgaatcttctccttatcgccgtacagccagcatgcatcgagaaactgctgcatgtagccgccgattccgagccactcgatcgtggtcgcaagaataataccgtccgcctctttcatcgtctgcggcagggtcgctatttcattcttgtgctcatagatattgatccgatcgaccgtcacacgcagttcgcgcagcacttcttccatcttattcaaaacataaagtgtcggatcgtccaacagtccccgtccaccgtaataaatatttactttcattcaaagcctccgttttgtcccatctgtcgctttatggaacatactgctttcagtatataaatttttgctcacaaaatcaatatttttgacggtttctgtgatataaaatgactgtcgcggcaaatccggcaagcagacctccgatgtgtccccagttatcaattcccgccgaggaaaacccgtaatagatggtaagcacaatcatcatcataattccccgggttgtaatctgctcaaatctgccccggtgcagtatcacgatccacaggaatccgccaatcactccgaaaatagcacccgaagctcctgccgacactgcataatcgccggtgcgaagcatcatcccgtaggagagcagtcccgccccgatcagggaaaccagataaatcaaaaaatacttcagatgccctgtgacacgctccagtcttgatcccatacagtataaaatcaccatattattcaccagatgtaccgcgccgaaatgaaggaagccagcagttatgatcctccaccattcatggttgatccggataaaatccgggtacatcgcgccgtgctccgccataaaaaatccgttcgtcgtatctccgagccattcaagcacaagatatgttataacattgacagtaacgagagcgatggtcacatattccgcccggatgttcttccacaaaatgcccaaccggttctttgccgtattctgtgcagatgcatatgcggtacctgtgtcctgccacgacgtctctgcccagccacatgctccggcaccctgccgcgacgtctctgcccagccaccggctccggtaccctgccgcgacgtctctcccgcgccgcctgttccggcaccctgctctaatgccccccggagtccgaaaaagtctcccggctggttctcataaatcagcagccgtccgctttggggctgatatacccacacattcctgcactctgcgcacaactttcgttccacctcggaatctccgccgatcagaagtgtcagcatctccacatgatataccggaaatccatccgggaaatccccaagtctcccctgcgggtgatagaacagatccatggcgtgttcttccatgctccggtactgctgcacagagaaccggtttccgccggagagatctaccgccattacaatatggaacccctcctgataatacttataataaattccggcttccgccagattggtgtgacaatagcggtagccttctcctcttaatacatttgcgactgctgcattttccatacgcgttacctctgtctgcactcttataatatggttattatagttagaccgggcgcagattgcaaacgtacttccctcattttttcttaaataaatctaaacttttcatctgcaaacatcacgacctcatttttctgcagactcattcctgttttataattcagtaattctccacccactctggtgccgttcgacgaattgagatcctctataaaaaagacagctccctttttgctgatctttgcatgcctcctgctcacggtcgcactcggaatccggccatcacactccgctgcactcccgattacatagttgtctttctctatcaccagatccgagtatccgccggttccttcgtagcgcaggattccttccggtttctgcgaaattcccaccaaaagcaccgtgggatttacggatttatgttcctcttcctccggttcaaagacaaacggctcctgctccttctgtgcatttttcatattcccgccgatcttccatctgcccgttcttcttttatccccggatactgccgctttgcctgccctttcgcctgccgctttgcctgccctttcgcctgtcggtctgcctgttgttccccccgccagcttgcctgctattttgcccaccggtctgcctgcagctgtgcctgtcgttttccatattttctcccacactgccgcaagcagttcctgcaccgtgctctctccgcgaaaaatctgcttccatatggaagcatcccgcttcccgtcctgttccttctgtccgacagtggcatatgctttcggctcttccggttctgtgtcatccagaccctccggctctgtcttcgcttcatccttttcatacggcattaaaagcagcgatttcagctcctttaactccattccccctgcactgctctgtccgtaaatatcatatgccgctttgaccgcacgctcatccgaatgatccagtcgtgtcagcagatattccatgaacgtccggaaggcttccggcagcggcattggattccccggatagtagcagaaagaaatctgtctggtccggtaatctacgaaaatactttccgccgacaacagaatactctgtgccggcagcagcattccctctaactgctgcactgcctcataaattccgttgagtacattgcacaacatatcataggaaaacgtctccgtctccaacaccgcatccagcgcctgttttcctgtaatgttataccacagatacttttctccgttctcctgcacacattccgcaaacacaatattccccttcggagcatgagcaatcatctttttttcccattcctgcaattcttcacactgcgcgagcaccatgtagcttgccgtcagttttctaatatactgtatcttcattttgaaataattcccccgcttcctgccagcggtaaaacatctttaccgcctctatttcctgctcctgccctatcgccagcgcggtgtccctgcactctgtatacatctgaataccgctcttcatggcgaatgcaaacaacgccagcacgagcggcaccacaagcgccgcctctatggtcagacttcctctccatccgttcataaattctccatttcgtcccgttttctaccgccatcccagctgaaatacatacgccgcaaaaaggaatggaagaaacggcatccggtaatcctttcttctatgcttcacaatgagtccaaacaacgccgccggaacaatcaacataagcgccgttaaaaacaactccacattccgccagaatcccagaaaaataccgcttgccatcagcattgcgccatccccgtagccaatctcctccctgctgacccaagccgcaagcaaaagcaccgcgccgattcctgcacccaacagcagatccgtcagcttctgtgtcgggagcatcaggtgaagaaccagtcctgcaattcccgccgcaagaggcacatacacgcatatcatctgttccttccagtcgcggtatgccgtgaccgcaaatattccaagcagcaacacctcacccacacaattctgcattgtctttcttctcctctcatccatctctctcccgctactgcccgcaccggctgcacggtctgcgtgttcccacctcggacagccgtatcatgcggacggttcgcttgatgccgctgcagccaagatctttgtggtagcagtcgccctggttcgtaatatagagccgtccgaatgcattttccgcataccggcactgcatgcattttctatatgcttccccgttctcattgcgaagtgccgcaatttccgcctccgccacagaccggatcgacagctccagatgcgtgcagctatactccctgtgatagacggttcctgtctgtgtgacatacacccactggtcttcatcacttccctctgcagcactccatcctgtccatttcctgcaatctgcccgctgttccatcgcaaaatcccacaaccagaagatccggatgggcagccggatatgatacgccgcccgcagtgtgatctcctccccggagaaatcggatccaatcaggctgattccaaactttcctcctgtgatgtaagtttctgcttccgtgcggtccgccatctctctcaaaagcaaagcctctgctattctggggagcgccgccccgtcggatgacacagctgccgcgcagacagccagcttccgtcccgtatcatccaatgccttctgcacctcaagctgaatctgcatgatgcggaagaaaaagagaacactcacaaaaaagcatgccagcaccggcatcacgactgctgcctccagtgtaaatactgcagacagacggaggcattgcggtgtcccttttcgcgcgatattttctgaaccagatatggaattttgttcggggagagatttgtcctttcttattatttttatgattcgccttgcttctacctcataaagagacaccgcaacacctccctcctcaatcatacgaaaacgttcgctgtgtctgatagcatagaccggacagatctctccctgtatgtaccatcagcccggaaaacaacggctgccactcataatccatgcggtaacttatgccacacagcacatgatccatgcggcagtctgcatacattggatgcaggcgtactgtccgttccatgatgtccatcatccggtacgccagccgctctgatgacactgtatacaggaatcccttcaggtagccctgataactcacaccgttttcgcagttttttgcctttttgccgtcttcaaacgccgccgcaagactgccaaactgcgctgtccactgcgtctcagtttttatcaaggcaatcttatcccccgccagcaatgcccggatgtccaaaatactctccacatacgcccacgccgcgattacccccgtctggacaagccgcacaaccgcaggatttcccgtaaatcccgccagcgcctccgccattccaagcgtctttgcccgcttgtccccatctccgaggatatgcgtgatattggctgcctcccggacaaacagcaggcgcttgatgacgctttccagattctctttatccgatccttttcctgccagcacatattccagttcatatgccagcgcgtgatcctctgattctcccagataatctccaaaatattgatccatatattccagtgcaagtattctgtcataccagtccgacacctgtatttccatattgccggtctgtttctgccgcctctctatcgaatcacccagatcggtctgcctcgtcgagaccgcaccaaaatcccccagcgtcattccaagcagtgcgttctgctttatcgcatgaacaacctctagcggattttcctgctccggcggaagttccggtatcaccgcttccgtcccgtccgattctgcctgttcccggcgttcactttttgcctcttcgatcgctgttctggcatcctcgatactctcttccccctgtccgctctgttccacctgctcatgctcgccatagcgttcctgtaatgcccgtatggtctccatcgccatattctgcttcatatatgctgccacacagtgcagaaacacgcttccctcctgatccgtcatcagacggtatgccaccggctctgctcctgcaagggtgacctgcaggatgcttcctcccgctccatcaacgtccagattccggtcaagccgctctcttaaaacagcggttacatgatccatggaaaatatatccccaccgtaggcgccatccagtcccagcagatgaaattcttcccagagcaccggctgatactctgcgcataccgactccagcgcaagcgtggacttcatatctgcatacgtctgtatctggtacaccctccccgcctccagaagagccataaggaaggatgccaccagcgcaaacgcaagtgcggaaaataccgtaatacttgctctctttctcattctcagacctttcccgcctttttcgtgatcgtatcgaaaatatcgttcaccagacttgtaagttgatctttaaagatcagtaccagcccgatcaacacgaccagaatcagaattaattccacaactcccacaccgtcttcttctctgataaactctctgatccctctcatagaatccctccctttctaaatttgaaatgccagcaccgccggcaccaacagtatcaccatcacaattccgagcatcagcatcatcggaaacagcaattttgttccggcttcctcaccgtaacgttttgcggcatgcttccgctcctcaaacgcattctgcgcttcctgctccaacagtaccgtaataccgcgggttcctttttgcagattctgcgtcagtatgccggcaagcttccggtaggatgccacaccgcaccgttctccgaaatgctcatacgcccgctgttcccccacaccgctctccatctgtcggcaggcgaccagcatctcctcataggcgggcatttccgccgttttattctgtgtccgcttctgtccataagctccggcaatttttctgaacgctccctgaagcgtcattcccgcccccagaagcaaggccagcttgctcaccagatccggatactcgagttccagaagcattttgcgcttcttttgctcctcctgctttctgctcatggataccaccggtacaaagcaggcgagaatcacgcccagtataaggatcttttccggtctctgatcgcgcctttgctcccagtgtatggtatgtccctccacctcatccggcagaaaaagtctgtctgctcccgcctccggctgctgtcgcgcaatcttttctgaaatccccttccggaagcgctcttcctcgtctaacagtctgggatacacgcagatataaaactcctgtacacatctggattttccacatgtcagagtgacctgcacattcaccagctccccctcctcgtccggttctcccacaattcttccagtgcggctctctatcagccggtaattgtcaaagctccattccgcctcaacatgcccttcctgatattcctcacgaatgacaacagcatcccgtatacaattcacagattcattgtctcccgggaattccttaatgagttcttcctctgccgctcgaagatatgcctgctcctcctgctttgtcagctcctgctccggcacatgcaccttgtaagctttggcctttttcgccccatccacatacatacgcaggtctgcctcgtagtcaccttctccattttctctccgaagcagccccttctccggatcctcatctgtctgcagttccatgtatccggacagcagcccgagacatgccgctgccgcaatgactgccgcccctttctgccagtctttcctgccccatttccggctgactgcccatccgagcaccgccagtccaagcgctattccacatacaatcacattttccccctctttatccacaaacctttcgtcagatctgaatattcaatatatgctctgaccatttgatggcggcaagatagcagcaaaaagcgatgctcatgacagccactccgaatgcgctgccatacaaagcgtccagaaattctcccgatgccacctgaagatatgccagaattgcaagcggcattatttccataatccgcccctccagacgctttcctgcaagcacggttgccacttccccttcgacttcaatccgccccgcgagtttttgtaccgtcgtctgcataatgtggacaaagtctccgccgctccgctttgcaaacgcgaacacctccgcaaaactctcgatctcctcacacccgcttcgcgccgcaaacgaaagcaacagtcgctccaatggttcgttcatgcgcaccccctcattcatccagcgcacctctgccgccataaatcccttctccccatgcaattccagaagttctttctccgtctccctccatgcattttctacagaatatcctgccagcagcgccgccgatgcagactgcatggcatccttgaactccatgagcagctgttcctttctcttttccttttgcagagcgcaatactttttcacgcataccaggtacgctgccggaaacagcagcattccccacacagaccggtaaaacagccacgctgccattcctgccgcccctgctcccactgccgcacaagccagtttttccacaaaacctgcccggtattttctatagtccactgctcccctccttctccgggttcattcctgcacgctcacatttttcggtatgcatcagccggccggttctcatcagggttcccctcacatgccttgcctcctccccggactcttcatacctgaacaattcatggagcataacctcgccctgctccattcctgctatttccactatttttaataccttacggcttttatcccgcagccttcccagatggatcaggatatcgatccccgatgcaatctgactgcgtatcgcggaaagcggcagttccatgcccatcagaaccatcgtctccaatctgcttaacatatccttgcacgagttggcgtgcccggtcgagagacttccgtcatgcccggtattcattgcctgcaatacatccagcgcctccgcgcctctgcactccccgacgataatgcgctcggggcgcatgcgaagcgccgtccggatcagatcgcggatcgtgatcggcgtaacgccttctgtattggcattgcgcgtctcaagccgcaccagattcggcttgtccaaaagctgtagttccgccgaatcttcgactgtaatgatacgttcctcgcggggaatatactgggaaagtgcattcaaaaaggtagtctttccggaaccggttcccccggaaatgaaaatattgtagccgcaccgcaccagtattttcagtagatctgccgcttcctgtgagatgcttcccatccggatgagatcctccatactgatcggattttccggaaacttccggatcgtaacggccgacccgtcgatcgccaccggctccagcacaatattgacgcgggaaccatccgccagacgggtatcgacaatcggagatgcctcattcaccatacggttgctgtatcctgccatctgctggatcacatcatttaacttttctttggaggaaaacccgtactccgctttgtacagccgtcccgctttctcgtagaagatatgttctgcaccgtttaccatgatctccgtgattgccggatcttccagcagttcctgcagtacatccagcttgcgcagggaataaaacagagtctgtaccacagcttcccgctcccccagcgtaagcatcctctctctggcaaagtcccttacctgtgcttcgatcagctgatatacctcctcgtcctccaccgtccgcgtcaggtcgatctgctccatgatctgtctgcgcagccgttctatctcttctcccgcaatctgcattgcgcatccccctgtcccggtcttattcttcccgtccgccgatatggttccggacatagtccccaaattcactccacaaaaactgacggtacacatccattcccgcacgtatctttcctgcagaaaacgggagccttatcacctgcatccggtctgcaatatccgccgccggctctctttccagatatctgcggaaatgatccatccggcagtcgtagtaaaatccgctcttcatcggacaataaatactggtgcaaagccccagaaaggagagaaaatcccttaacccctgaccaaaatccaacagaaggatctcatatgacgtctgcttctccagaaaggagatcagttcctgcagatcccccgcggtcatctcccccagatcctccggattatcaaacggctctacatagtgcatccactcggtctcatgaatccctctgccaagcgtttccgccgtaaggcgctgcctgcgcaatgcgagaatcacctcgcccagatcacattctcccggaacgccaagcagttccagcatccctgaatgttccatcagattcacatataataccttcttctccgtcgacagcttctgtgcgagaaccatcgaaaacggcatctgcatttcatggcagatcggagagtaaacgccaattacctccattcccgttccgatattctccattcttctgctgccggctcccgtcagagtcatcacctgcacctcatgcagaatgacctccatggactgataacggcagattccacggcagctttccggcacggaaccgtacgttaccgattccgcaaccgcatctgccatcgtctcctgcaagaccagcaccggaatatcgtatcccgccagtctctccgccatctcttcaaatccggtcccgcatatcgcaagatccggcttctcttcctccaacgcttccaaaagcttctccggcatcgaaaatgcggatactgcatattcttccgccttgcgttccaccaggtatgtgacaaatctgtcccggtattcccggtctgtatcacagactgccaccgcaattttattcaatggcacacccccagactacaataaaatatccaattaaaatcatcgctgaaaaatgaatcagtgttctctgattcccgaatattcccgccattcgcttctgatacagcagcttccccagtccaattactgctgccgtcacaaatgccgccagtatgacatataacaactgtctcattgaaagaaatccaccagctacggaaaataacttgatatctcctgcgccaattacacgcagttgaaataaaagaaacaataagataaccggaatagaaatgttcaccaggaaatgaacaatgcccgcaccgccttcccccagaatgcgcagtgcaagtcccatcataagtccggaagcaatcagccggttactgatccgcatctcccggaagtccgctgcgaccgcaaatgcaagtaccgtcaacagcgtcagtgtcataagttccccaactcaccaccccttcgttcatttgtaaatcggattatagcaattcatttttgctttgtctataggtttttcgcattttatttacatttgtaagattctcacaaaattttgagcagcaaaattccataaagaagcgcaaccccgctaaaaccaaggcttccagttgtcaaaagggtcaccggattgatgccgacggcaagcatgattccctgctgtgcgagccatttgttcacacatgcgatggcgcaggcacccagaaccgcgcgcaccagaaaatttaatgcaaaccttgcacgattttttaatatcataattccaaggaccagcacacagcttcccgcaatgatccagaatgatgtcagcgacatttcctgcatggcgtttcctccacacttttttctatatctatgaatgtccgcgtccgtttatgccagtttgtctgttccggcggacggacagatttttaccgttttttgtatagaatgggatttatttgcttatactttgaataagatagaaggaacaacactgccgcagacttcggcagaacccatagatctggaggaactatgctgcgtttttttcaacccgaaaaaacgaatgataatcattatacgctgctgataaacgatctgcaccagacggcacaggatctgcaggacgcctaccgcaatctggaaaacgtcatcgatccggatctgatcgactgttacatttatgaattaaattccgtgcagatgcgctacaaatttcttcttacaagcatccgcaactatgagttgcgcacacaaaaaaatccagaggatttttataccaaaaatcctctggaactatcggaatcctgacaagtctccaccagattgtcacgtccgtaagtatacccggcatacacctgctgcgtatttttcataagcggctccgaatgatcctgcccggccgcatgcacaaagccgtcatagagctttttcatgaggcggcaggcatcctcggcatctgccagatctctcttgtagagagactttgcgatcgaatctctgcagaacacatagatactgtagagattcttcgccatgtcataggagaaattgagcgccgatatcagttcatcgatcgcgcgctgcgctctccgcaatgcttctttgtaggcatcccagtcggctgcatcgtatgccgccctggcatcatccagatatgtgaaaaaaatatcatacataaccacgaccagtccgctccggttcgcctgactgatccgcctggtaaaatctacaatctgttcttttttcaagacagacctccgttctcatgcctcatcgcgcctactgcagaatctgcagtacctgctgcggcagatcatttgcctgtgtcaaaacagaaattgccgcctgattgagcacattctgatgtgtatagttcgtcatctcttccgccatgtcaacatccgtaagtctcgacatcgcatccgtcatattctccccaaactcatccagactgtttgtggaatactccagacgattctcataggctcccagatttgaacgtgtttcgctgactcttgcaatggcatcatccagacggtctaaggcacggtctgcaccattaactgttgtcacgtccagatcgtcgatatagaggctctcgcaggaaatctccggaatccggatgttcatattctgatccatgtttgcaccgatatgaagcgtcatggttcccatatctgtcacctcaaatttgagggatccgtcataggtctccaacacattgccggcagaatctgtcttggtcgcaccgtcctcatatcctgcttccaccaggaatgagagggaaaaaccgcccagatccgtgatggtcacacggttaccgtcgcactttgcggtcgcggaagaggtaaatcccttccagttcgccacgtcatccaattccatgtccgatccgttcggaacactcgttgtcgtcttgccggaggcatctgtctgctggcttccgtaaatccactgttttgtcgccggatcctgcaccagaccgttattgccggatgcgtcggacagtgcaaactgattggcaagcgcctgattactgaaggaaagcttcaatgtggcgtcagatccgtaagcgtctgtcgtgaatgtcaggcttccgtccgccttgctgcgctcgatctgtgtctcgccgatctctccagccgtccggagcttttcgtatacttcctgatacgtatcggttgctgcgatctcaacggttgatccattgacgctcatcgtgccggaaacgccgattgccgccgtgctgttaaaatctgcaccggacgtcacctctgcctgtgttgctgccgttttgactttaatctcataatttcccgggctcacctgatctgtcacctgaatgcggctggcatgctttgtgtacactctggtgtccagcgagccgtcaagcagtgtcttcgtattgtactcggtatccttggaaatacgatccacctcatcctttaaagatgagatctctttctgaatggcttccttgtcttcctgacccatcgtcgcgtcactcgccgcctgcacggaaagctctctcatacgctgcagaatacttgtcacctcacctaacgcaccatccgaaatgtgaatgacggaaataccgtccgacgcattggcagatgcccggtcaagtccgtcaatctgtgctttcatcttgcgggaaatcgccattcccgccggattatcctttgcatgattgatttttaaaccggaagaaagccgctccatggactggcttaaattactctcaatcccgagcagattcttattcgctatcgatgccgaaacattataatttattctcatcctgtcgttctcctttatccatatctgtcctatatatcgaccaacttgccgcttcactgaatacccggcagaaaagatttcccgcactcctgtgtatttcacgcaaactttgtttgcattccgccgcatttcgtattataattagcacattgccgggcatactaatgtaatcatatatgcccataatcacataaggaggtatcattatgacacagatcacaaagtccacgatgattggcgaattacttcagatcgatcagaatatcgcaccaatccttttaaatattggaatgcactgccttggatgcccgtcttcccagatggagacagtagaagaggctgccatggtacacggtatcgatccggacgctctggtaaaagaaatcaacgattttcttgcaaaggatctcgcttaatccgcaggcagacaccagacgaaaagggtatcccggttcccactggaaccggaatacccttttttctgttgcttaacgccgcaggacccttaaagctctgcaagcgtctgaagcgcatgatttttcaaaatcacctgatagtgttctttcatgaacgcgcctgctgccggcgtatacgtctgctgcgttccgtattcggataaaatattgcacaccttgttgaactcttccggtgtctgtctgctcttgctgaccagaagataatacctgtgtgccgcctcattcttatacagatcgttattcccctgatagaagccctgcagcgtgtgcgccagtctggttatctcagaaaaatcactgaacacaaataacttcgtaatgtctacaagtacgtttaccggagtttcttttttcttatcattctcttctgaaacgaagctatccttactgccctgtgcatctgccgcctttctgcgctcttcctgaatcctgcggaacaaccccagtatgtcatctgcaccttccggcgccggtgctgctccaccgcctgccattgcctcctcgtacacgtcttccggatccggatcggagaatctggaaaatctggtatcaagctcctccggatactccaccttggtaatcaccagaataatcgtgtcctgtgacaacggtattgcctctatcatcagcggaatatcatccgcctcaaaaccaaattcatacgccgcctgctgcatcatatcgcggaacagaagctttgccttctccgttccgtatgcaagctcactcaacttgatctgacgctctgccagatcctccctcgtcagcgtacagcgaatctgattgtcgtttactttttcaattttcatactacaccacgcctttccgtattctgaaagccaagcttccagccaaactttcatgcgaaactcccgcattacttcctttatccggaaaaccttgtaaactgtacatttattataatcaaatgctatattgatgtaaagtatacctttttattaaatctttataaactgccgaaaagctattgtcaaactacatttttcatgttataaacatatgcatgagatgcgaatctgccacactatgaaaggagcggattttgcatagaagaagttattctgttcggcaagtaccggattctttccgtactcggttccggtagtttcggtaccgtatttctcgccgagcatctcaagctgaagatttatcgggccatcaagcgaatccccaggtctctggcggatagatcttctttctccctggaatctgacttcctcgcggaagcagctcttctgaagaatcttaatcatccaggaatccccctcatatatgatatcgacgaagatgacgcctatctttatatgattgaagaatacattcagggtgaatcactcgagacgtttgtctctcatcaaaaaagcatttctgaggaactgatcgtaaaactgggcatacagctatgcgacatttttacctatctgcatcatttgtctccatacccgatcctgtatcaggacttaaagccggagcatattatattatgtggagatcaggtaaaattactcgattttggcattgcatctttttttaccggtttcggaaaaaatttccaactttacgggacaagccgctactgcgcaccggaaatcctgcgcggacagcccgtcactccggctgccgacatctacagtctcggcagggttttaacggagctttcggacgccatgtcctgccgctgttccagacagcttcggtgcatcttagagcaggcatgcgccgcagatccggcagaccgctgtcaggaggcctgcgatctgaaagccgcactgcttcgtgtaccattatcagagaatcagcagtcttcgcatctcattcggaacattgccgtcatcgggagcagacccggtgcaggcgccacgcatatttccatttctcttgtcagcaccatgaatcaaaaacatattcccgccatttatattgccgcggacgggagcgcatcgcttctacacgccgccagggcaaatcatcgtctgatcgaccagaacgggatctttatttatggaagcttccgcgggattccggactatggggacagtatatctgtttccgttccgccggatgactgcgttgtaagagactatggcacccgcgcgcccgcgcttgccgagctggcttcttttgacctgattcttttcgtcttaaacggaggagactgggattttgtacaggcagccgcctatgggaaacagctggcactgctgccgcagacacgttttctctgcaatcacggctgccgctctgccgcaaaggcatacgcacggcagttagaccaccgcgtctactgctttccggaagatgcggttccatacgatacaacacccgaaaaggaacggcttgtttcgtccatcttaccgaagaaaggagggagacggcatcttctattttgatcgcaacgaaaccaaagcacacatcaccatcggcattctcggatgtcatccgggggctggcgtgacacagctcgccataagccttagcacatactgtgcctccaggcgaagactgcgcaccgcttgtcttgaacttcacaagcgcagcgaactggcgcggctgattccggaatctgctcttgcggactccatacaccgccatgccttacaatgcagcaaagcgccggatgccgcggacacttcaaaggcagagttttttcacttccgcctgcacggcgtggattattatccgaatctggcaccggatgctgtgccccgcctgctgaatatggggtatgattatctgatcctggatctcggcagcttaaacgaatccgctgccgcagaattcctgcgctgtgaccgcaagattgtgctaggcagtcttgcactctggaaaacctggagttatgaggaatttttcaaacaatttaacaactttacaaaccttggggaaggttatcattatctggtacaggtgggaacattccagaatcattccgttttttccaggcagcactccatatccatgcaggaggttccgttcatcaaaaacccttttcatatagagaaggagcactttctattttttgacatacttctgtcattttattcattgtaaccgcaacacactgtctgccggggatcaggcagcgcaatttttctttatatcacgaaacgtaaccagcgaattccttttggtatttttcagatttgggggaatctaatgtgaatgatgaacatatgcaaagactctatctggagcttacgtctctggagaatcgaggcattaccatctggctggagggcgcgaaaagcagctcgcaggatgtagccagccagctctgcgtgcaggaggaaagcacgtacatgagagattatatttttgacgagggggtgttaaaggaagtccattttgataagatcagaaaagatcttccgtaactagtcgtaactggaacagaatgactgagttcctcaatgcccggtcatactgtctatgcagtgaatattatttgataaaaagacagccgggaactgccgcccgagttcacaatctcccgcggccggttcccgtttttcattctgcggcacgcaaaaaatggcagatgcaaatagctttgattttgtgctgcaatatgctacaatgtaggggaaatctctcagaagaagaaaggatttttccatgaagaatacaaaaaagaatattataccggtcattgccgttcttgttttaatcgtcattatcattctgttcatgctgctcggacgactgatcgaaaaatacacgccctccaaagagcaccaggagttatccgagtattacgggcttgcatctgatgattccgtagccctgatctttaataatgaagtgttgtctgtgcaggggcgactgatcgacggaaacgtatatctggattttgagacggttcacgataagatcaacagccgttttttctgggatgccaatgagaacaagcttttatacaccaccgccaccgacctgatctcggcggatgcggagagcacgacctactatgtgaccaaagacgcccggacgttagatcacacgattgtaaaggcagatgcctccaccgcatatattgcgatcgattttgtaaaacagtattccgattttgattataccgtatacgatcagccgaaccgcgttgtcctcacaaaccagtggggcgactacaacaccgctcctgtcaagaaatccacggagctgcgctatcagggcggcatcaagagtccgattctcgccgaccttgcaaaaggaaccgtgctcacggttttagagccggacgagacctggacgaaggtgatgacggaggacggcatcatcggctatgtaaagaccaaagccctcggcagcacctccaccgcgacccggaccagcgactacactgcggaagaattttcgcatattaaaaaagatttctccattaatctcggctggcaccaggtaaccaacagcagtgcgaacgcaaacattgcgaacgtactttcaaacaccaaggggctcaatgtcatctctccgacctggttttacttaaaggatacgaacggaggcatcggttccctggcaagttctgattatgtaaactattgtcaccagaacaacattgaagtctgggcgcttgtaagcaacttcggcgccaaggatcagggactggagagtccggataccacgcaggtgctgacctacagttccagacgtgaaagtctgatcaacaacctgatctccgctgcgatccagtacaagctggacggcattaacgtggactttgaatcgctcgacccttccatcggtgattcctatatccagtttatccgggaattatcgctgaaatgtgccaacaacggcattgtcctttccgtcgataattatccgccaacagcttacacggcattctataaccgctccgagcaggcagtctttgccgactatgtcatactgatgggatatgatgagcattacgcaggttccgaggaagccggatcggtgtcgtccatcggttttgtcaatcaaggtgtcgcagatacgctccaaagcgttccggcagaccagctgattctcggtatgccgttttacacacgtgtctggagcgagactccggtatcggacgatggcgcggctgtcagtacaaccgaggacacctccgacagtgatacactctacgagctggactgctactcggcaggcatgaaagaagtccagaacctgatcagcacgaacggagccgttccggtgtggtccgacacagacggacagtattatgtagaatacatcaacggcggcgtcacctacaagatctgggtggaggatgccacttcacttgaggagaagttaaaggtaatgcagtccaaccagctcgccggcggagctttctggaagcttggtctggaggatccggcggtctgggataccattatcaaatacatcaactagccgttctaacccccggggatcgtgaatatcattttatgaacgaatccccgggggttttttatttcatgaaaaaaaagttggaacttatcatgagcctctgtcttctggccgctgccttcattctcgcaaagcagggcgccgtactggtccagagtgaaaaggcggcacgtgaaaaaatctgtattgtcgtcgatgccggtcacggcggaagtgaccccggaaaggtgggcatcaacggcgcactcgaaaaggacatcaacctctccatcgctttaaaactaaaagatcttctggaacagagagaaatctctgtcgttctcacccgtgattccgacgccggtctctcacccgcagacgccaccaacaaaaaagccgcggatatgcagaagcgctgccagataatcgcggacgccaatcccgctttcaccgtgagcattcatcagaacagttacacaaccgaagacatcaaaggcgcccaggtattctattacgggcagtccgaaaacggcaagcgcttagcggacgttctccaggagcatctgatttccgaagtcgatccccagaatacacgcgtcgccaaggcaaacgaaagctactatctcctaaaaaaaacacccacacctacggtaatcgtagaatgtgggtttttaagcaaccaaagcgaagccgatctgctcctgaccgaagattatcagagcaagcttgctcatgccatctatctggggatactctcctatctcgaagaagaatccctgctttaactgttttatgcatccgctccctgcgcatctgttccctgcaaaagatcctgcacctgccgcacaaagctttccgcaatatggtatagccttgttgtctgcacctgatacgtcgtatccgactgtttctctgtggtctcctgctgttctggtgcatccacgccaaagacgcctgttgaaaaatggttcagatccagatctgcgatgcatgcatagtgaagatctgcctcgtttccactgtccaatactgccgtaaggctctcctgccggctgtctaaaagttctttggtatcctcccggtccgatgcaatcagaccgctgacgccatgctcttttgcctggaacgttgccgcaatcttaccgtgaagcttggtttccatcgtgatgtcaaccagccctttttcaccatccccacgcacgaccttcagcgaaatgccgacaacaccgctctcggtctgcaccggtattgcatactgctcttcttttgccatcatactgccgatggataactgtgccgacaacagacgcatctccctgatatcaagacttgtcacgtcatcgctgtcgatcattcccttcattacattctcggcaacctcagcaagctgttcctgtgcggcggcaagtccctccgggcttgcgattgcctctccgaaatcctcaagcacctgctccttcgcccgggcaagctgctcctcattttcctctttgtggcttccctttgcgctctcgccgaagatctggcggaatacgccgttccggtcatttaccatggcttccatcgccatgacgttcgtcatggtattcggaatgtcgtacttctgcagtaccgtgtaaatatcctgcgtcattttcgcgctctgcgataactgatccagctgctccttcgcatatgcataatcctggctggcatcgtctgtctgtgcctgcgcgagcgcctcctttaactgctccggagtcatctcctcccagtccggcgtctgtgatgcgacaaccttcatgcgctccggtgtgagcagatctgcgacatctttcacgcagttgttctgatatgccgcttccatctgatcggtgatggaagtgccggaatatccactgccttccacttttccaaaggattcatccacactgtaatccatttttccactgcgcctctcggatcggaccgccatcatcagattgcgcatggtgatatcggctccctgatttacaagtgctcccaccgcggcgccgtccgactgctctacctgatggatcaggcgatacgttccgatataagaagcccgctcttcctggctgattccctccgtgcgttccagcttccacaaaaattctccgaagccgcgctcatcgttcgcgccagtctccctttttatctgctccgctgtcgcattcagcgtactaaaatccatatccagcggatcgattcctctgcggatcatctccgtcaccgttgccggcgtcaggttgcggaatacacgctgcacctgctcatccgccgctttcatctccgccacggattcctgtgtaatttcaatctggttataaccgaggatgcgcactgcacgctgatttgcctccgtcgcctccagtccgatatcgttcaaaatatcatccacattgcggaatgccttctgaatcgaatcccccaggtctgcacgtggtgccgtcatcagggtctcataactctgatttgcacgctcaaaggtatcccgcatcgcacgtccggtatcatgaacctctgcgacagacgcatcctttactccctgcgctcccagcacgtatgccggtaccgtttttaaatcgttgacacgctctgtggtctcacggaaaagattcacgttcgtctccgaagcttctacaccctgtcccttcaacagctgttcgtaatattggttctccgtctccttcaaagcctccacaagctctgccagcggctgggtatcaatctggattccctttttgagcaatgcatagtttgcctgtgctgtcatcgcaagacgtgtctcctccagctgtcttctggcggtcagcagatccagttctctctgtgtataagcagtgctgccatccgcactgctctctgccgtctcctcctgcgcgtctcccgaagcgctatccgccgtctcctcacccgagcgatgtgccatcgcttcttttaagctgcggatatttaactccatgccgtgatccacgacatatgcgacatcctcatccgtcgcttcgccgatcacatcgcaggcatcctgcgccttgtccgcaaatgattgtccatccacaagcagtgcttcctgcgggctttttccttctgcaaccgcagccgccatactgcccagcagcgcctctgcctgcactggcagactgagatttttcagttccatatagtaagcaagattctcctcattgagcggcacgctattgtccagcagccactggcacgcctcttttgatgtatcatccaccgaaagcccggcgcgcgcaataatcgcgtcaatctgatccgaaaacatcgtcatatcgactgctgcctccggatttgcctgataagcagcacttccgctgtactctgccttgtacaggttaccgatcgtgggctccatcccgttatccagcatatatttcactgcgccgtcccccggcgtctgaagtgtctgcgccagtgagagcgcctccatcacgccccgcacattttcctcggtgcacgggagatcggcttccttcattgcctgcgccagctgtcttgcaagcgcttcgcttccggtaatcgccgccatctgctcgtaatccagatcatctccaaagaaagagatatccactcccgcttttgcaagctgtgccttaatcttatccgtctcggtcacaatcgtattggtcgtcgtatcgtccagtgaaaatccgtcttcctgcattttcgcataatcttccggggaggtagtgttggacaacaccgccatctggttcttgcgctcttcgacatcaagcgtcgcggacgcttcgatctcctcggcaaccgtctgcttgtcttccgctgccggcttggcatagatggcatcttttaaattcacggatttcgcattgtcactgacactgcttttttccacggcagctcccgcggctcctgtggtatattggctcagaacggccccgctcttttcctccggtccgatactctgctttacaacatctataatattctggctctgctgctctactctcatcctgtgcactccttttaccttttcagctgtggttctatagagtaatcgaatatgaagcataaaaatggcgcataacactatgcgccattcatagctgatatatatatcggtcatatcagcaccattattaagctgttcttcgcatttcaccagcccccgaaatgcaatcagtaacgaaataccgccacgccgtacggctccagaggatacgcgatcgagtatggtctgccgtcacattcggcctccaccgccttgtaactctgcggacgctgtctgctacatcctccaaactcttcggagtcactgtccaatatcagcttgtaggtcttcttggcaggcactcccactctgtaatccggtcttgccaccggtgtaaagctgcacacaaagagcagctgattttttccgtccttgctcttgcggatgaaactgtagatgcttctgtccgcatcgttcgcattgatccactcgaaaccgccccagctgctgtcgagctcgtaaagcgccggattcttccggtaaatatgaagcagttttttcacccagttctggatatgcttgtgatccggattgtcgagaaggaaccaatccagctcacgctcctcactccactcgcgaagctgtgcaaattcctgtcccataaataaaagcttcttccccggatgtcccatcataaacgcgtagcctgccatgaggttgcggaacttatcaataccaagtcccggcattttgttaatcatggagcatttcagatgtacaacctcatcgtgggagagcaccagaatatatttttcgctctcattgtagctcatcgcaaatgtcatcttgtgatgattatcccgtcgaaagtaaggatccagcttcatgtaatccaaaaaatcatgcatccagcccatattccacttatagctgaaattcagtccgtcatcctccaccggtccggtcaccttcggccatgcggtagattcctccgcaatcatgacagctcccggatttcttccgagaaccagggtattgatatgtttaaagaactcgattgcctccaggttcttattgtcgccgtactggttcggaacccactgaccggcctcctttccgtaatcgagatacagcatggacgccaccgcgtctacacgcagaccgtccacatggtaatgctccacccacagcagggcgctgccgatcaggaaattcttgacctcgttcttaccgtaatcaaaaatcttagtgccccagtccggatgctccccttttctcgggtctgcatactcatagagacagcttccgtcaaactctgccagaccgtgcgcatcctttggaaaatgtgccggaacccagtctaagatgacgccgatcttgtgtctgtggcattcatttacaaaataagcgaagtcttccggtgttccatagcgcgaggtaggcgcataataaccggttacctgatagccccaggaaccatcgtacggatattcgcagattcccataagctcgatatgggaataccccatctcagtcacatacggaatcaaagattttgccaggtcacgatagctgtaaaatccatcgtcctgtctgcccggatgtcgcatccaggaccccgggtgcacctcatagatggcaagcggctgttcgtacacatcttctttgtgcgtggcgcgctctttcatccactcggcatctgaccacttaaaatgttcaatatccgtaactgccgacgccgttccgggtcttaactccgcgtagttcgcataaggatccgccttgtacaggcgctttccgtccttcgtctcgatgaggtacttgtacagatcaccctcctcgacacccggaataaacaattcaaaaattcccatcgtctccggctccaagcgcttcatttcattggcgccctcatcccatccgttaaaggaaccgatgacccatacacgcgcggcatttggcgcccacagatcaaagcagactccccggatgccgtattcatctgtgggatgcgcccccagcttccggtaaatctcatagtgtgtcgcctgcccaaataagtaccgatccagctctgaaaaatttgccatacccatctacccctttatcttgattttaaaatccaaaatctttttcatgaaggatgacataatcgtcatcatcatatcttctggaagtgataatactgaacgccttcttaagtcctccccgttctgcgtgggcgattgcctcgtccacaatatccttgacctctgtaagggttgtcgcctgatccagcttttgaatattgctgatgctgttgtaaagtgccagaactcccatctcatcgatggtgtatcccagttcgttggcataggatctcgcaaacgccaccagttcgtcgctcgtaaagatcgggatattgattttctccgaaaaccgtgctgcaaatcccgcatcccggctgagtgccttctcgattcctcttctggtgtcctccataatcacaaacaatccgctgttgtcactgtcaagcagcgtgccaagcttgactgccgtctctcttgagatggctcccgccttttcgataatcagacatccgcccgccacttttttaaggagcgccgccacatctttctgattcagcacggaagcttcgatcttgccgatttttccgttcggcttgcccacttccttctggagcgccttaatcatgctggtcgcgagcaccgtcttgccgcttccctgtccgccctgaataatcatattcccggtggaagccgttttaccggacgaaagtcttgccgctgctcccgtaagcgcctggcacagctgctgttccattcccttaatcggcacaaaatatgtaaaaatctcccgctgctctttggaaagccgggtaattgcctgatgtccttcctcctctggctcctcgatcttcggaagcacgtcgtctgccgctttcgcttttgaagctccgctcttcgggtgtcccccgcctgccagctttccgccggacttctccgccttcggaagttcctcgtcctccggctgtatcttctgctcttccatcaatgcctggatgtcggctcccagtgctgccgtatccggctcttccatcccggcagcatcgtctgtatcctccggttcttccgccgcctgtggctgcgccgtgtcttttgccaccgcttcctctgccagaagcgcctggacatcggcccccagggtaaacgtatccgggtctgtctcttcggtatagctgcccggaatctccggttccgcgattccgccatagcttcctgccgcatctgcctgttccgtctcacttaccaccgcatctgtctgcgtttcatataccgcccctgtctgcggctcatataccgcctctgcctccggtgcgtataccggctctgtctctgctccgtatcccgcatctgtctgcggttcatatgcagcctccgccgcaagctgctccgcacctggttctatctcatacgggctctgtgtcagctctgtgatgccgttcccccagaaatctgcctcctccggctgcaacgcttcctgcggctccgccacacctgctgcctccgccgcacttgccgccgcaagctgttcatccattctcgcattctcggaagataagcggtcgatctcctgctgtaagatctggttcatgttcgccaccatctcagccgccttatcgtcagcaatcggctggccgcccagatactcttcatccagcagatccttcggtgtcagtccggagtcaagcttcggaatcacatccaccagacgctccatgatatcgcctgcctcctgcagtgcacgcgccttcgcggattccagcttgcgctgcttcgcctcctcaagcgccgtctctgccgcacgcttggtcttctcccagtctgcaagcacctcatcaatactcatctgtcccgtcacctgcggctctgtagcccccttatccggaacatacatgctgatctgtccgtcataatcctctgcaagaagctctttaaaattgctcttgagcgagttgtcaatctctgcatccgtctcgatatggggcatctcgatcgtatcctgcggcaacggttcctccttggggatctgaagatacggaatctcctccacgagcttcttgatcgtatccatgctgtcctcgaccttttccttgtcggtcgcttccatgatctgcaccatattcttgcgaagttcatcctgcagattctgtgtattaaaacgctccggtgaaagctttaccttcggtatctgcaccggttcgctcacaatctcgccggactcaaggtcgtcctccggccgcacttccacaacgccctcttttttgaggcggaactgccggtacttttcctcctgctgtctggtcagcggctgatagagcatcttaagctccagcgcccgctccacataaggtccgtctccgaaccagagaatcaactcatcgcaggcgtcgatgcatttttcgctcatccccgccttatggtaaaggcatgccagctcaaacgcccactcctcggaatattcctgctcttttaattcttccagtattccgatcagcgtctgcagatcggcgccctccgccttactgatctcgtagcgcagaacgtatttgagattgtcgtgcggggcgatctccacgaattcctgatagtagtctctcgcttcctcgcagttccccatcttgatggcaacctccgcaagccggtagataatcattcgtccgatcggagatctgtcatacgccatgagcagaatgtccctgctctcctcatatcttcccacattctcgtagatttctcccgccttaatcagtgcgttgacgttttttattttatgccagttgatcgtgtccgcaatctccgcagcggctttgtaattattctctgcggtaaaggacttcatctgatccagctttaatttatattcgtatttatccaatttgtgccacctcaaactgtgcgattttcactctttttattaccttttagtttatcatacgcactaatagatgtcaaaaatattcgtccgaaaaggctgtcacgcagtggtgtgctgcctgtctttttttattggaattatcttactttttccagacatgaaaatacccccatataggacttttatatttcattgtcctatatgagggcagcatattatttttcaggtgattcttcgattttttcctcggtgcctttctccgttttttcctcatagacaagctcgtttgtcctcttgtcaatgcgcatcagatgaatgtagcttcccgtatcgtccaccagaccccgctttcgcagaaaataagataccagcttctgtgccacatagtagattactgccatgagcggcacaccgagcagcatgcccgggaatccccacagcccgccaaataccagaatggcaaataccacccagaaggaactaagcccagtagaatcgccgaggatcttcggtccgataatattgccgtcgatctgctggagaataaagatgaaaatgagaaagtacactccctgcagcggattctgcaatacaacgataaggaatgacggaattgctccgataaacggtccgaaaaacggaataatgttggtcacgccgatgatcactgcaagcaggatcgtatccggcattctcataatagtgagcaccacataggcaagaataccgataatcgctgaatccagaagttttccggaaataaatccgccaaagatttcgttgctcttgcgcaccgtctcaacgatcacgttcgcacgtaccggcttgaacatggcgtaaatgattttcttcgcctgtcctgcaaacgtctcctggctcgccagcacataaatggacacaatgatgccgaccaccagattcagcagaaactttaaagtatagatcacaccgcttgcgatcgacgtcagataaacctgaacctgcgccagcagatcattttcaagaaacttctgtacggcatcgcttgctttttgcagcacatcgtttataacacctacaatctccgaatctcccttgaagaattcatccgaccagtccatgatgttcttgacctcgctcggaagccccgtggcgatcccctgtatactctgtatgatagaaggaacaatcgccgcgataagcagtacaacgattccccctaagaacacccacgcccccgcgatcgcaacgccgcgcgacattttttttgcttttgttttgctcttcatccgcggttccaacagcttcatcagatgacgttccagaaacttcattaccggattgagcagatatgcaagcaccagccccataataataggctgaagaattgtggtcagctttttccagaaatccgcaaacccgttgtaacgatatatcataaagaaaaacagtatacagcagcaaaacgtaataaacactaccaacgcgattactacatattgctttaaattccatccgccatttctgtcgccggaagtattgtctgtctgtcgtctctcactgtccatagtaaacctccttgctgttcctctgttgtctgccgcttctgctctcgcagtgcacgtccggtcagcttttcacgcctacggcaaaaggtccgaaaaacctacggttttccggacccgctgacgcgttcacatgcatcggatccggctgccgctgcaagcatctgcatccgtttcgatgcatgctcacttttgcctatgcgtacattataccccatgcagggaggttttccaatcgctattctttatttgccgctaatttaatgttaatttttcaatgactgccttcagctggtctgccgacgcaagaagtgcatttttctccttctcattgagcggaatctcaagcaccttctcgattccgttcttgccgaccaccgacgggatgctgagtgccagaccggacagaccgtactctccctgcagttccaccgacaccggaagcacggcatgctcatccttcacaatgctctctgcaattctcgcaaccgccatggcaatgccgtagtaggtcgcacccttgcgctctatgatctcataggcgctgtcgcgcacctcctcatacaggcgctccatggatgcctcgtggttgaaatgtccccgcagttcgcagaaatgattcagatcgattccggacacattcgccccgctccataccggaagttcgctgtcgccatgctcaccgatgataacggcatgaacgctgcggctgtccacatccagatgtctgccaacctgatatttgagtctcgccgtatccaaaaccgtaccggagccaaagactctctccaccggataaccggatatctgctgtgccgcataggtcagcacatccactggattggcaactatcattaaaattccctcgaacgccgtcgccgtgatctgcggaacgatcgattttaatataccgacattcttctcgatcaggtccagacgcgtctctcccggtttctgattcgctcccgcggtaataatgatcagaccgcagtctgccacatccttatagtccccggcatagatgtccatcgacgccgtgtagggaagaccgtggcttaaatccatcgcctccccctccgcttttgcgtgattggcatctatgagcaccatctctgaaaacagtcctttctgcatgagggcaaacgcgatggacgcccctacaaaaccacatccgattactgcaacttttcttggattcatcattattcatttctcctttctatttcacacacgcggtcgttttcctctatgttctattgttacacaaccccgtgttttctatttcttccaaatcctaccatggtaccaggaattagtctgttgtatttacaacaaaataaactttttggttagttaaaacaaactccgctgtaaaaacacaggcagtgcatttcttaacactgcctgttctctctgatcctattgccacgaaacgggcttatccgcgataataattgatcagacaaccttttaagataatctctctctcgtcgtccgtcatcgcacccagtcccagtctaaattcctttaactcagaacccttcaccacgtatgcggtaatctcgctctgcttttcttccactgccttgcggatgtccggcaaaaacagataatccagattctggaacggaagcgctccctccggaatgacaaacggaagcataccccagttgataaggttcgagcggtaacgctttgtcgcgtactcattggcgatgtttgcccagccgccaagcaccttctgacaggacgctgcctgctcacgcgcagaaccgtcgcccggcttcaccgcgaaaatcgtacttccgaagccaagtgttcccggcttcatctcttcgccaaacgttttctccggaaatgctgcacggatcgcatccattaccgggcgcagttcttcgactgcctcaaccggacatgtgccctcctcgactgctttctgtgccttctggatctccttagcacgttccacatactgcggatcttttctggagagtgcaaactctgccaatccgagcgggttcgagcggaaagaagaggtctcgccggaaggaatcagctcatctgtcgtcgttaccggatcatgaatctccgatactacttttaataccatattctccggaagcgcactcatcgccggccagtccttgatgttcggtccgaactggatctccacggacggatctgccacgcccttgctgtcgaagacacggtttgcatagatcgcactgtcaaaatgatacttcggcttggaaaaatctacatccacgtccgtagctgccgtcaaatatcccttgtttgccgccgtcgcagcgatggaacgcgcgtccataagcgccacggaagcaacctgtcccttctgcaccttggaaccctcgcggttcgggaagtttctcgtggagtggcggatggaaaatgcattgttcgccggcgtgtctcctgcgccaaagcacggtccgcagaatgccgtcttcacaatcgcgcccgtctccatgagcgtggcaacggctccatttttcaccagttccatataaatcggcgtacttgccggataaacgctgagcgtaaactcatccggtccgatcgacgcaccctttaagatgtccgccgcatcacagatattctcaaaaccgccgcccgcgcagcctgcgataataccctgatccacatacagtctgccgtttctgaccttgctctttaagtcgagcttgaccgcaccgtcaaagcttacctctgcccgcttctcgcagtcatccagaatatccatcaggtttgcgttcagctcctcgatcgtgtaggtgttgctcgggtggaacggcatcgcaatcatcggtttgatctcatccagattgatttcgatcattccgtcatagtaagcaactgctgccggattcagttccttgtaatctcctgctctgccgtgaatctcatagaactccttcaccgcatcgtccgttctccagatagaggaaaggcaggtcgtctcggttgtcatgacgtccacaccgatacgatagtccacactcatgttggaaacacccggtccgacgaactccatgaccttatttttcacataaccgcggtcaaatacttcgccgatgatcgccagtgcaatatcctgcggtccgacgcccttgcgcggtgtacccgtcagataaacgccgactacgcccggcatatcaatatcgtatgtcttggagagaagctgctttaccagctccggaccgccctcgccgactgccatggtaccgagcgctccgtatctcgtgtgggaatccgatccgaggatcatcttgccgcctgccgccagcatctctctggcaaactggtgaatgactgcctgatgaggcggcacatagattccgccatagcgctttgcacaggtcagcccaaacatgtggtcatcctcgttgatggtgccgcccactgcgcagagactgttgtggcagttcgtcagtacatacggaatcgggaacttctccagtcccgatgcacgtgctgtctgtatgattcctacgaacgtaatgtcgtgggaagtcagcttatcaaacttgacctgcagcttgtccatattgccggatacattgtgatcctttaaaatgccgtatgcgatcgttccctgcgccgcctcggcttttgccacctctctgcccgtcctgctctttattgcggcagctgcctgcgcgtcatccgcaaccagttccgttccgtttaccagatatactccgctgtcatataacttcatgatttcctccttgcccttatcatagcctttcaaaaattatatcggtcttgcaggtaaaaatcaagcactttcgcgctttatcatgacaaatcgccgtcttcaaacatcagtatgatatcaaagagtgtacccgcttttgccgcgatgcgttttgccgtgtccgcatccggttccgccagatccggcaccatgaccgtccggattcccgcatccgttgcggagcgcacgccgttgggggaatcttcgaccgcaatacagtccgcaggcgcttccccgatctgctcacaggcatagagataaatatccggcttgggcttgccgttctccaccatcgttgcgcacactatacggtcaaacttgtcgtagatgccgattctggtgagataatcctttgtgcgcgccggatctgtggcagttgccaccgccgtcttaatccgatgcgcccgcagatagtccagaagttcatccacacccggctttttatcgatcccgttcgccgcgatgtgcgccttcatcagttccttgcgccgctcgcggatcgtccagtacgggaaatccgctccaaaccgctcctgcagaaacggcgccgcatactttgccgcgagactccggatcgcaagaccatcctccaccgtcatatcataccccgcctccgctgccgcctggcgccagtatttgttcagccatttttccgtgtcaatgagtaccccgtccatatcaaagatcactgcttttaccatatcactgccccctttcttcctgtccctccacatagagcggaagagcgatggtcgccttaaacaggtctccatccacagaaatatcaaacattcctcccataagaagcgtgagattcttcgcgatggaaagtcccagaccgcttccctccgtcgttctggaggaatccccccggataaaccgttccgtcagatcttccacttcgctgttctctcttgccagtgaccgcgccgaaacattcttaatagaaaagacggcacgttcttcgtccgcctgcacttccacatagacacgcgtcttttgaagtgcatacttggcgacattattatagagattctcgatcacgcggtagaggtgccgtccgtctgaccagatgtagaccgcctggcgcggaagctttgtcactatcgtaagttctttgtcctcgaacttttcattgaattcgccgccagtctggcacaccagttccacaatgtcgatcttgtgcatctcaagcttcacattcccggaactgaccttggatgcctccaccagatcttctgtgagctgctttaagcgctgggacttttcgtccaggatcttcacgtagtttttcacgcgctcgttgtccacatcctcgcgctgtataaggttgacataattgataatcgatgtcagcggtgtcttgatgtcatgggagacgttggtaatcagatccgctttcatgcgctcgtttttcgtgctgtcgtccacggcatgcaacagtccggcgccgatattgttgatcgtctccgccagcttccggtcctcaccgtgaagttcttcaacgtcaatcttggcagagagatcaccgtccgcaatctcctcaactccctgcaggatctgatagtgctccaccgctttccggagcagaatgtatgcctccatggcgctgaataagagcagggcaatgagtgccggcacatttctgtagtaaaacgctcccgccgccaggaaaaagcagacgatcatatgaatcgcaaagatcatcaaaatcttaactgtgacagacctttcccggaacgtcttctcaatcccgcgtccaagccagcacacaaggctgttctcccacatcacttccgctttcaggcgacgcaccatactcagatagaagataagaaacagcgtatcaatgagaaaactgatggtccctgatgcgacaaggagacctgcaacctcccattcccggctgcttgctctcgcaagcagcataaccagctccgccgataaaaacacaaagccagcaatcataagttcggtcttgatgcggtcaatggagcttaaggcgatgccttcctccccctccttgtgtcccgctgccagtgtcaggtacacaagcgtcagaatccagcccagcagactgataattgcccctgcaatgctcactttgatccacggatgaagcctttcatattctatcttggcatcccgcagatcatcccctgccgaaagctgtgtgtccacgccgatgacaagcaccacgtcttccaggggccagtagatctgattgccgttattgctgaaaaaataattctccagtccccggatatccgtgccaaattccttgtcttccatatcgtaaagcagataatctcccatggtctttgcctccatgagaaccgtctgcgtatcgaactgctgcccctctctggtatctggctgattagtataccacacgccattgatcttataccagtagcagaaatttgtactctcctgcttaaattcattggtatactgcagatagcgtttctcatcctccgctgtccgaagcgcgcctttctgtgttaggagcagataatcgttcagatcattgcacttctgctccatgcatttcagataatacccggaactaaggaaatcatcggttccaatatcggtaagctccagaatattcttgctgacaagcgatgccagaaggaacacggacactgtaagaacgattgtaaaaaaggaatgaaggagcactcccgttattttcattccgtaactgtaggatcttttctccataaagacgctcctctagttcttgtcaatcttatagcccacgccccagactaccttgaggtagcgcggctctttcgggttgatctcgatcttctcgcggatatggcggatatgaaccgccaccgtattgtccgcaccgatcgcatcctcgttccagatgctctcatagatctggttgatggaaaataccttcccctgattcttcacaaggagaagcagaatgttgtattcaatcggcgtcagcttaaccgtctccccgtccaccgtgacctcttttaaatcatcgttgatcgacagaccgccgacggtatatacggacgcgtcgttctctgccgcattgccaagctgcgtataacggcgaagctgcgactttacacgtgccaccagttccagaggattgaacggcttttccacataatcgtccgcgccgatattaagtcctaaaatcttgtccgcatcttccgttttcgcagatagaataatgatcgggatactgctctcctcccggatctttaacgttgcccggatgccatccagccgcggcatcatgacgtcgatgatcagaagatggacttctttttcctttaagatctcaagcgcttcctctccatcgtacgcctttaatacctgatagccttcctgctgtaaatatatgtcgatcgcttccacgatctctttgtcatcatcacataccagaattgtctgcattctcttctctccattctaacgtggcagatatcgcactgcatatcagcctttctattgcctgttttcttcattttaacagacacgcgcaaattgttatagaggagatttcttaattatttttaaaaatctgcgcgcaaaattaagagaatctttattgcgggcggcatattcccgctttaagataagcaggtaacccaaccatgcttttattctggaggatctttgatatgaaaaagaaaaaaacgaagaaacgccgcagagtcattttgctgattgcagaaattattctgattcttctgctgactcttttgttgtttgcagttgtaaaactttcaaaaatacagaaaacaaagcttgacatggatcaggtcgccatcaatgaagatctgtcctccgaaacaatggatgccatgtcagactatcgcacagttgctctcttcggtctggacaaccgtacaaacaattccctgtccaaagggcggagcgatgtcattatgctcgccaatatcaacaacaaaacgcacgaggtccaactggtctccatctaccgggatacctatctggacaccggcagcggagtctttgaaaaatgcaacgccgcctacgcaaaaggaggacccgagcaggcgctctcaatgctcaataccaatctcgatcttgcaatcacagattatgtgacggtagatttcagtgcaattgtcgaatgtgtggatctgctgggcggcgtggaaatgacgatcaccgatgacgaagccagcctgatgctcggctatattcaggaattaaaccgccttaccggaaataccgcttcctgcccgtcttccggcggaacttacaccttaaacggcgtgcaggcaacggcatttgcacgaatccgttacggcggcggtgatgattacaagcgcacggaacgtcagcgtgcggtactttcagctatgattgccaaagcacaaaaatccgatctgaagacgctcaacgcactaatcaacactctcttcagcgatattcagaccagcttctccaatgccgatctgcttgcactcgccaccaatatttttaattacaagctcagcgagaccaacgggttcccatatgaaaaaaccgcccaccgctatgacaaagtgggagatgtcgtgattccctgcgacctatcgtccaatgtcacggcacttcatcagttcctctatacagatatggcttacacgccttccgatacagtgaaaaacaacagtgaaatgatcaccagcaaaaccggttaccgcgagggcgacggcttctgatcccgcttcaaatgggctttctgccatatcagtgacaactgcgcctttaatgataaaaatacacctgctatgatattctttatcttcagcgggtgtattttttcatgtcctgcatattctaagtagtatcgttttcaacttacagttgatctcttcataaccgcaagtatgggaaacatgcactagactaagcaggaaagcgaggcgttgattatggacaagaatatggcagaccgtttaattgaattacgtgaaaagaatcatctgtcccagagtgcagtcgcaaatcgtctcggtgtaacgcctgccttaatcagcgcttatgagaaaacggagcgtaaccccagtctggagcgcctgatcgcactggctgatatctatcacacatccacggactatattcttggacgaaccacgaccgattcctacgctacgatcatcgaggtaaaagacctcaccgatgcgcagatccgtattctgcgtgaacttgtcgaagtcatgaagcacacggacgctacccggtcgtagtgtcactctttcttttgtctcttttgtctgtccctcctcttctcctgtgtcttttattcttatcccttttatctgtgtgatctgtattctgttccctcttcatctggtctttttcacttagttcccgcaccatctgcaaaagaacctctgtgcggtcaccgagccgggcatacgcctgatcctcccggattcttcggattgcaaaatgcctcttggcaaagatgacgatcatgtcaatgatcagataagacagcgcaatattgggcgtaatccctgtaaaatagtaaaataggatgcaaaaaattgccggtccgatcaataccagcgaatacaggttgttgcgctgtatgttcgtcataagataaaaccagctctcttcgggatccgcatccacccagtgtgcgcgttcgtatgcaaatctttcccgccttttcagaattctatctttaatactcatgtcctgtcctttattctatcgaattgatactgttttagacattttaacatagagttgaaatatttgcaatctataggtgtagtttttatttcttaatttttccgttctccaccaaaataccgcacatcgtatgtgttacagattctgcgtatctcgatgacgcccaccaccgctgcaagcacgccgctcgccacattgctcaccgccatgacaatgccggcgctgacgtttccgagatccgtgaactgctgcaacgcccaaagtaccggcacgcggaacagaaagacacggcagaagttcatgaccagtgtcacacgcgtctttccaaatccatagagcagcgccattaccgccgcgttgacgccgagcgggattgctccgaccgcctcaaaccggtaaatctgtttgatcatctcggcaaactctgcattgtccccggcaaagagacctgccagctggtttaagcataacagcgacgccgtcatgatgaccagtccgatgagcatgtcaatgtaaagcacccagcggaacgccaaaagcgcgcgcttcggtctgccagcccccagattctgactgataatggaggagcctccctcctgaaatccgttctgcgggtttgtcgtgatgccgccgatattgttggagattccaagcgctcccaccgtccaggaaccgtagacggtactcatcgaattgacaatcacttttccgaccgcaaacgcaatccgctccacgatgaccggaaacgacagcgtgagcatcgggcagatgacctccttttttatggagatggcacgcaatgagaagccaaacgcatttcccttctggttcatattgatgcacgcagcgagaagaagaaagctctgcgagatgatcgtcgcacaggagatcatattgatgcctccgcccagcccgtagacaaaccatgccgtcagccccagtttcactacgatgaccgccgtattgagaatcagaatccgtttggaatttcctctggcacgctcaatggcgatgtagacgttattgaaaaacgtgatgatcattccgaacagctccagcctgaaatacgtgctcccgtccgcaataaattcttccggtgtattcatcaggcgcaggaactccggcgtgaacggcaccaggacaagcagtattgcgataccgagcgccccgcacatggcaaacattgtgctgacacgcttttttaccagcatgaaatcgccggccccatatgcctggctcaccttgatgctggcgcccaccgcaagcccggttcccaccgccgagatcatcatgttgatctgggacagatacgcgaccgcggacaccgcggatgcgccaatatgtgacgccatcatggtatcgagtatcttaaaaagctggttcaggctctcatagagcgccagtggaaatcccacatacaataccacccgccacatgggtccgttcagggaaaactcgcgaaattgttcgtccttttttgaaagatctgcctgcatgttcttctccattctttttgtatctgcgtttctttacttttctgttctcccatggtataacaaaaatatatttatttatacgaattttttccgttattttgctttatactactgattttttgtcattgcaggcaaaaatccagaatctccattccgcagaaaccttcacggaaccaggaacaggagttatacctatgaacgatttcgcttcctccagctgtcacgaccgcattgccaattttaaaattacgcaggtacagcgcgattcgcattttgatatgggagaatcccattatcacccgtactacgaattttattacctgctgtccggtcagtgccgctgttttatcagccacagcatttaccggctctttccaggggatctgattatgattcctccctctgtgctgcaccgcgttctctatgaaaccaagcgtcctgccgagcgcatcaacatctttttttcggaagattacttacaccgggtgtctgtcgccagcggtccggatctctgcgccgggcttttttcccgcagcagactcaccgtaccgtcttccagccgtccacagttagagcgcctgatgacgcgcctgcgtctcgagtccgaaagcagcgacccttatgcgccgctcatgaccaaaagtcttttttcagagcttctggttgagatcgcgcgctgccaggatgtccaccagactccgcaatttctggacgagaccagcaccgccatccaggaaagcgcgcgctacatctacgaacattacgaggaaccagtctcactggcagccgccgcggcggtcgcacatatgaatcccacttatttttccaaaaaattccgggagacaaccggattcggatttaaggaatacttaacgcacatccgccttcagaacgccgcgcaccttctgcgcacgacggacacttcgatcactgaaattgccgggatctgcggtttttccgacggcaattatttcggggacgcgttccggaaacactatggcatgtcgccgcgcgcctaccggctgacgtaacaaaacgcctgagtcccccaagcacctcgtgagatgcaatataggggaactcaggcgtataacccggcaatacttcttccttgcttcctgtatgaaattgaatggtggaaatatctttctccggatctgctccttttgattctcttacttcggccgcttgccaaagaaagaatggcgctccggtttcttcttaaagtattccgcatcaagatttacttttatctccgccccggtctcaccagtgttcttctccggctcttcctccggttcctctgtctctaacggaatcccgttcttctcaaaatactcttcgtttatcttgatctccggctttacggatgcatagacggaagtcgcctcttcttcctcctgctcacgcttcgcgcgttcctttgcaatctccttgttgcgctgctcgatcagattcatgtatttgttcgtatcccttaaatcctcaaggtggctctttaactccgactgatctctgcgcacatttgatttttcctgcgcaagcgcatcattcatcttatcgcagatctcccggacagagtccatcgcatcctgcatgatatcctgtacgcggtgaagcgcctcatccgtatacatgaccgatccggcatacacatcctccgccatgcggttcgcatcctcgacgattccgtccgtcttcttgcggaactgtcgttccgctgcatcgcggctctgctgggtaagctcatgttcctccatgagttcgtagatgcagacattcaggcgctgcaggagatttaacgcctcctttttgtctatgataacccgatttgtcgctttatcatacacctcgctgttggcatacatgatatgcatttcccgcaacacctgctctgtcttatcctgcgcactcataatggtctcctgtatttcaattatcttttatgtattgtatctgctttccgtctccgtatacgttttatcaattttaccactaacacaatcagtaatacaaccagaattatcacaatcagaatcacggcgataatcatagccgcatatttattcgggctctttacaagatctccgagcgagcggctctcatccaccaccttgcggtcgtgcatctggctgtaataagacggcacattggcaataccgtcgccgtctgtatcctcaaaggactgcatatatctggcaatcgaatcccacgcttttaactcgcggtccccctccatcacgatgacgtcctcaaaatcctcgatcggcgttccgtccgcatactttggcacaagcgacaacagtccgtgcgacatatccgtcaccgcacttaacatctgtccgctgtagagatctgccacaacgcggtacagcttatcgtcctcaagctccacgcggcttccgttctcatcggtcagataaacatccgtcaccttatttaaaatcatgcggttcggattgtatgtaaaatgaagtccgctcatgtaaagtctggctgtcgtcatgtaatcagaaacggacgcgtcaatctccgcggctgtgcgaagttccttccctgtcagatagacactgatcagcgggtatcccggcacgccgtccggaccaatgccaagggaaaaagaattaaacacctgctccaccgtaatgtccccggccgtgtaggtatcgcgcaccgtaccgctcggaaccacggcaacgtccaccggtactccgtcaaaatcatcggagttctccacggcatacacataggcgtccgacatcaggtcacccagattgtgttccgtgtgctcatactcgagatcatgcagcgtggaaaactgcacattattggttgcaagcacctcatccttggtgtaaccgaaatccgcgagataaccggtatccaccgcttccatgaagccatcaatcttctcctgggtcgctccgtccgcagtgatggtcgaaagaatcggaaccagcttataatccgttatctcccatctgccatcgctcttctgggtcatggaaagttctccgatcttcttgccgtactctcccgtggatacaatatacgtgtctccgtgcacgatcggctccgcgagctctgtgtgggtatgaccgctgataatcaggtcaagatccggcacactcttggcaagaatctcatcctcggatttgctctcatcctcccacgtaccgctgtgtgatacgcagacgatcatgtccacatcttcatttgccttgatctctgccaccgtctccctgaccgcttccaccggatcgcggaataacagttcacaggtcggcgcgcaggcaagtgcgtccacaccgaacacacctgtcacagcgacattgacgtctcccttttgcagcacgacataatccttcacgccgtactcctcaaatccgctctggatctgctgctgtccgtcatttaatcccgcagcctccatcgcgtcccagtctacattgcacaccacaagctccggcagtacgtcgccgctttcggctgcactctttagcatctgtgccagtccgctggaacggtaatcaaactcatggttaccaaacgtcgtcacttcacagccgattgcgcccagcatccgaagctccgccgcctcatcctcatagacggtctgcaccagcgtacccatggaaaaatcaccgccatcaaccacgagcgtgtccggattctccgctttctgctcatcgatcactgtcttgatccttgcaaaaccgcccacctctgtggattctccgtcaatcactgtggaaaaactgttcagatgggagtgggtatcgtgtgtaaacaccacatccagtgtcttcccggccgcctccgcagccgcagctgtctgtgcgctgccggcaaacagcggcacaaccaaggctgccgcaagcagccctgtcagaattctttttttgtttttcattcaaaaaccctccttaattatgaaatatactccccatttacactcatcggacccccttagatcccgatcagctcttaagataggtttattttaccatgaaaacagggctattgcaaatgccacagccctgttcctcttacttctatgatcacttagaatacatcgcaaaatactcctgcgccttcctcaatggaatatccagcttttcctgcaaacgtgccagaatgtccggttccggaacattgtatgcacagccagtttcaacgattccctctgcaagtccaaaccgcgctccttcctcgcgtccggcttcgtattccgcttcccgcagctttttttcttcaaagtccttgtcgtactccagtatactcaccatttccacctccgcacggttttccctcaaaaagtcttccagaatcccttctgcgatacactcttctaccgcccgctttactgccgcatccagttccatttctgcggtgtatctacgcactttcgccacgtactgtgcatattcctttaacacctaacaatgttccatgagtttccgattgcatccttcgttcacgttcagcacgattacccgcaattctaagttcggctccccttccagattctcatatgcatcggacaggcggagttctgtacactcttccagatcttctgttccattataaaatatgacaaacttcggagtgggcaatttctgcaatgtcgaggagtacagcgatttattatttacatatgcctgatattccagcgaaatatagaacatgtcacgcagcggcatgttcggatttttcgtggactgatgctcataaaggcagatctgggtatctaccataaacgcaagatcgtttttcattcccatgtaaattgcgttcttcaaggtaacaatttttaagtcttctgcgttttcgtagtgccggtcattcatggcattgtagagcgacagcagtttttccttgtcagaaaacaacatccggaatactgtatccttgtactcacgctttgcatgcggttcgctgactgtcgttgccaatttttccatattcagttcccccttgtcagggatcgcttttcatgatccctgctcttttccttaaaatgagtttaaaagcatagacctttgaaatgcgattagaatatagacggtgcatgcacctggactcgttagaaatatgcttttgttgatgtgattattttaccatttatgtgatgttcctacaagcatctttttctctttttatgtattttctctctgccttttccctgtctctcctctgtatatggtgtttcttataaggaagaggggtaacacgctatacagtgtgttacccctcttccctatactcttatattttgttttaatgcctatttgataaatcccacctgtttgctgatcttctcgatctgctcgtccttgcgcttgttgaactcaatcttgtttttctcaaaaagattattgccctttgtatcgatggacacgatcagcggaccgaactctttgacacggcagttccaaagtgtttccggcattccgagatctctccactcggccgccacaatctcctcgacctccgttgcagccacaaccgcatttcctgccgggaaaacacagtggatggcaccgaattccttgcaggcacgctccgtattttccttcattccgcccttgccgatgatgacacgcacgccggtctcttttacaaactcatactcgaatttttccatgcgcatgctcgtggtcggtccgacagagaccatctcaaacttatcgttctccagcggacggatgatcggtcctgcatggaaaatcgcgttgtttctgacatctaccggaagttctcttccctcctcaaccagacggcggtgtgcaacatcgcggcaggttgtcatgcttccgttcagataaataatatctccggccttaatatctgcaagatcctccgcagaaatcggagttgttaaaattttctttccatctttcatctctaccattataattccacccccgaatgtgttgtgatcgtatagttcagatccttatcaaagataatgtgtcctcttctgtggctccagcagccgacattgactgccacaccgatcgtggacggatgacgcgccgtgttctcgatgttaacgcccataacggaatatttgccacccatgccctgcggtccaagtccgattgcattgattccatcttcaagcagacgctccatttttgccgcgcgctcattgtcattgtgggaaccgatcggacgcatcagcgctttcttggaaagcagtgccgctgtctccacggaggttgctacgccaacgcccacaagaagcggaggacatgcattgattccataggaagtcatgacatcgagtacgaacttggtaacaccctcataaccttcgcccggcattaagaccatcgccttgcccggaagcgtacatccgccgcctgccatgtaggtgtaaatctcacactgatcactgtccggaacaatatcccagaagaccgtcggtgttccttttccgacatttttgcctgtgttgtactcatcgaatgtctcaacactgttgtggcggagcggagcctcaaacgttgcttttacaacggcttcttttaagagtgcctccagttctccgatcagcggaaagtttgtgccgcattttacccagaattgcagcacgccggtatcctggcagctcggacgattcagctttaccgcaagttcctgattctggaacatggtatcgtagatcgtcttggacagcgggctgtcctcctgtgctctcagctctgttaattttgcaatgacatcatccggcagcttctttgccacatgtgcaataaattttgccatgtaatcggtaagctgctcaacctgtgcttcttttgacatttttttgtcctccttttatctataactatccagtacaccgcagctgtgcggcaaaaactgattttacgggaaaaacggatacaataccggaagcaggatcatgctgacaacggttgccaccagaatcagcggaattcccgcttttgcgtaatctttaaaggtataacctccggcagtaacgaccatggtgttcgccggcataccgatcggtgtcgcataggcacatgaaccgccgatcacacaagccatcagaacagcacttggatcagctcccatacggttcgcaatggatacacagatcggaaccataagtgcagtcgttgccgtgttcgacataaagttggtcagtacacagcagagcatgaataccacgaaggtcagaagatacggtgacgggttcgctcccagaagaccaatgaccttgtccgcaatcatctcacctgcacctgtctcctcaagcgctgacgccagggaaagcgtacctccgaagaggaagattgtctttaagtcgatggcctttaaggcatctttctcactgatgacaccggttaagatcaatgccagtgcgccgaccgcaccaatcacacagagcttgatgccgatctgtttttcaaaaatcattccgatcagtgtcagtaccagtatgatgagggaaagattctgcttccacttcggtacatggtcgaaatcctttgtctcatcatagattccatcctctccgcccttgtgctccggcagaagcttgtagccaaacagtgcaaagaaaatagttcctgtaatcaggatcggcagaccgactttggcatactcgaaaaatccaaatgctttccccatgtcttccatcgccgactgggcgatgaggttgcccggcgctccgatgagagaaaggtttcctcccatagccgccgcaaatacaagcggcatcagaagtcttgatctggaataaccggattttgcggcgattccgatgactaccgggatcagcactgctgcggtaccggtatttgaaagtacgccgctcatcacaccggtgatgatcataatggcgataatcagctgtttctctgatttggcgaagtgtgtgaccacgcctccgattttatttgccatccctgtctcaaacagcgcacccccgacaatgaacatcgccacaaacaggatgacattgctgtccacaaatcctgcaaacgccgtcttccagtcaagcacgccggtgacgacgagaccgatacagacgatcatggatgttacgccgagcggaatcttctcccagacaaacatcacgacggcaaacaacaaaaataatagtgttattactgatgcttccataaaaccctcctttgttttgcgaagcaaaatgcaaccgccatgtaaaaacccttcccatcatggctcattgaatttttcccttgttgcttgtttgatatttgatattgtatccaatttctgagtttagaatataaaaaaaggccgaaaatgtcaatacccttttgacactttcggcacttatgttcaatttatctttttatttttgtgcaatacacacaattacacttccacataaggattctctttgaaatattccagaatgagttccaccatctccgtattgatttcacggacaagttcacattccgtatatacttcatatccgcccgctccgctgtaacggtaattgttaaggcacagcgtaaaagaatctgtctccgttaccgtctttccctggtaagtcagatttttaatcctgtttccgaccggtgcagccgggtcaatctcatatgctgcccccatatagtagtcatagttatagtgctccaccttcggcacaaggaagctttccgcaacctgcaccgttccatccgtggcgacggcaaaatactccgcgctccgctccatcacctgctttaactgttttccgctgatcctgcatacgatgagcgtattcggatacggataggttgctataatgtcgcggacactcacctcgctgcgaaatccggcgatctcattggcaagaccgaccgctgacagctgtgcgccggaaaaatgtaactgtatccggtttaaaaaatcggcaatcggcgaaccgtgcagcgccatttccgctttttctccgggaagaagcgcccggcttaaatgcccgatcggctgatccagccaactctgtacccgttcttcctctgcggcatagttttcgcataatgcaccgacagcatttgctccgtcggcgacacgcttctcggagcggacaacaagtccgtcttttgtccgctccgcttccagatagtgatactctttggcattctcaagcggctgtaccacgtaagttccgtgcacatactgcccgtcgacggacatatgctggtgcccggtcagcagaatgtcaaaatccagttccctacagatgcggtatccgacattctccgtcgtcttctgcaggcgctctccggtctttaaatcacactcaaatccgccgtggtagatgcaaagcgtaatgtccacctcttttttcagatacaaaagcgcctcttttgccgcctcaaatgggtctgtaatgcaaattcccgcgagattttccttccgctcccacacattcacatagtctgtcacaataccgacaatcccgacccggagtccgtttccaagcgtgtggatcacatacggatggcatgctcttcccgcctcatctacaacattctggcagacacacgcgccgtgatgagcctctatgtaagcgttctgatagtccatcccataattaaaatcatgattgccgagcgtataataatcgtagccgcagtcgttcatgatatccgcaatggcctgcggcgatcctgacttctgcctgcaatagtaggcaaaggcggagccctgcaatatatctcctccatcaattaccagtgtattctcatcttttttgaaatcccgggcaaacgagaacagccccagatcttttcgtttcaaatccccgtaagtcgttgggtaaaaatacccgtgaacatccgaggtaaaatatatctttaacgtttgttccatcttatccctcagtcgtattatagttatccccgcgtcagcttcacacggatctttgtggagattacctccacaatcagaatcagcacgatcagtcctgcaagaattgcacccacctgattccatttgtacgcactcattgcaaaaataagcggcgcaccaataccgccggcacctaccagaccaagcacagtcgcatcacgaagattcatgtcaaaacgatagattaacgttgacataaagtccgggaataactgtgacagaatgccataacggatcttctggaacatcgtgcatcccgctgcatcaagcgattccagtatcttggtgtcaaggtcttcgatactctcaataaacatcttgctgatcataccgatcgagcacagggacatcgtcagaagtcccgcaaatggtcccggtcccgtcacacggatgaacatcaatccatatacaaatgccggtattgtgcggatcgccataataaacacacggaaaatcagtgcaatcggcttcgggacaaggttggctgccgccagaaaagacagcgggatcgagagcactgctcccacaatcgtacccagaaatgcgatacacattgtctccaacagcagatacgccacgccggaggttgtaaaattaaataagagcgctgtgtccggatgaaaaatgccgctgataatctttcccgctaccgtaagcccatcgccgcctgttgttccgctttgcaccgtggacatcgaccatgccagaagtgctgcaacgatgagtgccacaagaatcttcgcgtaccacgtcttcggctcctgctcatacattttatctatttcttttttcattctgccctgtcccctcctaggtaagcttcttacgaatataatggctgagtgcctcaatcacgagcaccgttccgaataataccacgaggatcatgcccacgctgtcatattctctccagccgatcttctcgtttaagatcagaccgagtcctccggcgcctacatatcccaggattgccgcatagcggacatttccctcaaaacagaacaggcagacggaaaggtatgccggaagcacctgcggctggatcgctgccagaaatgcctgtgccctgccggctcccatcgcttccatcgcctcgtaagctcccatgtcaaccgtctcaataagctcataaagctgcttgccgacataagcaaatgtaaagacggcaattgccacagttcctgccattgttccaagtccccagatataagtcgcaatcagtgctgccaccagggtcggaatcgtgcgcacgatacttaagaaaatacgcaccacgcccagaacgaccttatttttgaccagattgctggatgccaggatggcaaatggaattgccagaaccccaccgatgaaggaaccgagcagcgacatcttgatcgtatctaaaagcggtccccagatactgcttaaatatcccgtctttggcggaaacatctgtcctaatatgacaaaaaactgatttccgcgtgtgagaatcgtattgagcgaaaaaccggtaatccggacggatatgatggtcgcaatcagaagcagaagaagtacaagcggtgtgcgcgtgcgtttttcctccactacttttccgtcggataacaccagtttcttcggcttgaaaattttatcatatattcccatcaggcttcctccacctcatccggtatctttccggcatagatcatgtttaacacatcctctgtcacatccgcggaaggtccgtcatagacgatctttccggcgcggataccgatgatccggtccgcataggcaagcgccagttctacatggtgaatattgatcaaaatggtaatgttcatctcctgattgatcttcttaaaatcgctcattacctgctttgccgttaccggatcaagcgccgccaccggctcatccgcaagaataatcttcggattctgtgcgagcgtgcgggcgagcgccacgcgctgctgctgtccgccggagagctgatccgcacggatatatgccttatctaaaatgcccactttgtcgagtgcctccaaagcgttcaacttgtcttcttttttaaatataccgagtaatacacgccagaacggcatctccggcacttttgccatcaatacgttacggataaccgtggtgcgtgtcacaagattaaaggactgaaaaatcattccgatattgcggcggaatttccgcagttgttttcctttgaggttcttaacctcctgtccgtccactgtaagcgtaccggaagtaatgtcatgcatacggttgatcgtgcgaagcagtgtcgattttcctgctcccgaaagaccgatgattcccacaaactcgccctgctcaatcgtaagattgacatcgtcgagtccaaccacgccgttgggatataccttggatacgtttgaaaactctatcataaatgctccttccacattgccctaaaaaatatgcagcacagcggagtgatgtctcttttccaagatcactccgctgacactgcaccctttatctgcccgtttctgattagttggctgcgttcagttcctgaatcagcttctgtgcttctctttccttatcgtagtcagaagactgtgccggctcatatccgttgtggctgtagattgcgataaccgccttgccctcttcggtattgccgatgttgatcagtgctgtctgaatggctgtctttaagttctcatccatgtacggagaggtcttgctcacacagacggtatcgttgtagatcggatctgtcacaccgatgacgttcgtctcctcccagatggaagcagagcgtccatactcgctggtccagttttcctcgtagtcacgtcttgcgtctgcgtaggttaccaatacatctacctgtccggatgcaagtcttgcgaatgcacttgcataggaatcagactgtactgcattggaaagatctgtgatgcccttgccgtaacgatcctgcatccataatgccgggtaaatgtagcctgccggtgaagaagaagacatcacgctccagtttgcgctatccagatcatcccaggtaagctcctctccggaatttaccttgtctgcaagctcctgtcctttctcagaaggacctgcgatgaacagagcacggtaagatactgcctgcttgtcagatgcctctgtcggctgtccgtcattccagtccgccggattgtcggagtccttgttcagaccatctctggttgcggtcaggatcacatcacatccgtcatcatagagcacgtaagtaccgcccggaataaatccaacatccgctgttccggcggaaagtgcctcgcctactgcctcgtatgtcgtacctacggaaatgtttacactgtctacatcatagcccagtcccgcaagctcgttctttaacagatcactcaacggctctgttgcagttacgatctcttccggatctctggacggtacaaaatatacgtttaacgcatccagatgcacattctcagcggaagctgtctggctctccgtagtagcagctgctgtctcgcctgctgctgcacctgcattgctgttatctgttgtctcttctgtgttacttccacagcctgcaaatgtacccatgcacattgctgctgccagtaaagtagctgtcaatctcttcataattgcaaatttctcctctctgcagtgaaacaattattcatgcactgtcgcccagttccaattttgtcggcaggtaaaccttcatactgtccacgcgcttgtcgatgattcgttccagcaaaagcttgattgctgttgaccatacaatatccggcagcatccgaagactggtatatgtcggatatttcgtctgcagcgtctcaatatcacggtaaatgacaaccgcaacatccttcggaatccggtattttaattcttttaccgcttccagggcgccttctgccacctcatcatttccaagcaccagaacttccggtacatcatctgtctccagaagttctctggtcagacggtagccgctctctctgctgatttcacccacacagaaatagtgctccttatagcaccctctctgcgcaaggatctccgtcagtcccattaagcggtgggtaccgatccgtacaccatccttctcatagataccgccgatataaccgatactccggtattccttgacatccagaagatagtgtaccatatcctttaagccctgctcatagtccatgataatccggtcaaactcataatctttctgatccgaattgacaaacaggatcgcatcactctgttttcgcaggaaatttatctcttcctccgaaaaagatccaaatgcgagaatcccgtcgacatctgcatcttccctgcaggcaatccgtaaaaagctgacgtccgctttctgcggcatcgccgctgcaatgtggtctaacgatgcgagtcgtatatcatgccggtcccctcttaccagatgccagtctgccacaccgatcgtaacatgggtcttattctgcgcatgacgcatcttaggcggaatatagtttaattcgtgggcaatctttaaaatctggttcctgacttctgctgtgacggtcaatgtttcatcctgattcagtaccctcgatacagtcgccggtgatacctttgctaactctgcaatttctttgattgttgccatataatcacgcctttcttctgcattatatttcacgattttttaaatttcaatagcatcggtaaacttttactaaatttttaccggattttacacgacctatacattaggcttataaagcgacggtttttgacttataaaaaagaccggaaatgccatattctgacatctccggtccgtccgcctgtttcttctcaacggtaatttgtcagcatatcgtccctgcttcgcatgatatgacgatacatttcttcctttgcagccgctccgtttctctcacgaatcgccttcatgatgcgctcatgctcctcgatcgacacctttgcataatccgcttccgtaatcatgctgcccatcgacaacccgttccacaattcagcaatcatattttccatacggctgttacccgccgcactccagatctcactgtggaattcacggttctgatccgcgtacgccgcgaagtcgttgttctgaatggactctgcggcacactcgtaggactcctcaatccgggtaatatccacctccggcgcacagcacatctctgccgcagcactctctaagatcgcgcgcagctggtaatgctctctgatatatgtctcgttaatccctaaaacgaccgctcccttgttgcgctgaagcttaatcagtccgtcacgcgcaagaatctggaacgcctcacgcaccggcatgaccgacacctccagctgattcgccacactctctaacgtgacagcctccccttcctgcagctggcgggagagaatcgccttccgaagttccgctgccaccttttcttttgccgacggcatcttaatcggatgtaatccattcattgatgttttcctctctctgttaccactcgtgcggcaagttcctcataatacggctccatctgcgctgccgccccgcgcagttcgtctgcactgagctgtctgctttttacttcccgtttctgccagaagccgtcctgccattccgttcctttgcggtactctgcatctgcgcttcccgtttcctgccgcggcaggctgatcgcaaaacgcacatagcactccaccgcattcttcaggatattccgcacataagcattgtctgtcatcccatagattctgcggtgaaattccagttccgtcagcgtctcctccacaaaaataccgggattctctccctgctgctccgatgctgcaagatcgcagagcacacggcgttcaatatcgccgatgataccgtaaatctcccggatatgtgcatctgaaaaatctgccgtcaccacatgtctggtcgcaagacgcaccgcgagtccctgatgttcaatgatctgcaacgcctcgcgcacagggattctcgatgcgccgagaagccccgagagttcctcctgcttcaatggcgtaccgccccggatcgctcccgacaagatctgatcggccagctgatctgcgatataatctgctgttctcttgttcatctgtatctccatactgcagccgtactcctctatcctcttaacagaagttctttctccacaactttgccatttctgatatagatgcgcggcacacgtttgctcaccgcacaggtaagctcgtatggaatcgtcccggcaagtgccgcaagatcattgatggagttctgttttccgaacacctcaacctcacttccaacatccacacccattttccctgtcagatcgatcatacacatgtccatgcagatcttcccgcgctgcggagccggtccctcttttgtcatcagcgcgcagcggttggaaagacagcggaaaaagccatcggcatagccgtagggaaccacgccgatccgcgtggtatgctctgtcttaaaaatgccgccgtagctgatcgccgtccctgccggatagatcttgatggtgctgaccgtcgtctttaatgtcatgaccggcaaaagccccagctcgtccgcaaattctccatagccgtacagaagcagtcccgggcgcaccatatcaagaaaggtctccggatatcttgcaaccgcgccggtgttcgcgcagtgacggagcgcgaactttcttcccaggcgcttttccacttcctcaatcacacgcataaacaggtcgaactgatgctccgtgtattttttgcagtcctcgccgggctcgtccgataccgcaaaatgcgtaaagatgccctccgcatccagtccgggcagagagcagccgtggcagattcccgcaacgcccgtctcaaaataatctccgtcgcacagataccccagacgcgacattccggtatccaccttgatgtgaatctttaggatgccgccgcatttgaccgcctcttcgctgtactcaagcgctttcgcctcgcagctgaccgcctgtgtaatgtgatactcgatcagcctcgacacctgctccttcggtgtgtggccgagaattaaaatcggcatcgtaacatcgtttaaacgcagctcgaccgcctcatcaatactgctgaccgccagataatccgcaccaagttcctgcagcagatgcgatacctgtacagaaccgtgtccgtaggcatccgccttcacaacccccagaaactttacatctgcaccgattctctctcttaatttatgataattgtgtgccagggcatccagatcaatctccgcccaggtacgtctcaatgtcgactccatgccgcactgcctcctgatgatttcttctatatttatacgaatactataatccacgcgccacatttatgcaaacaaaaagttcccttccatcctttggagaaagaaaagaacggaaagtgtcgcaataagcatagaccactttgggtgataagtaatattatcagaaaaccagagaacaaaaaagttccagaataaacagatggcggcaaattctttgaagcaaaattcacatatttcttccatgccgtggctggcatcccgttccgtgtcttggccacgtttggacactcacggagtgtgtccgacaagccgcagacaatgggcggactttctggtgtccctaatggcacctcttcacagacaatataaaaccgcgcgaaccgaaactcgttgccatctgctattaaaaatatggcagatggcaattcaaacatcggcttcgcgcggttatgttttgttcagaggtgccaataagggacacacacaaaagtcctaaaattgtctgccggcttgcgcacacagtccgtagagtgctccaaacttggaaagacacggatcatcacggatgccagctgcggcatggttagaaataccggattttgcgatcagaatttgccgccgcatggttatctggaacttttaagtatctatttctcatagtattacttatccccccaaaagagatctatgcttcctccacttcaaagtagctgctccagttcgcggacagcttctcatgcagggtacttaccgcagaatccagatcttcaatggttggcaagcccatatttgccgctccttcgttcattgcggtggcaagtgatgcaatattgtcctcgtcgctcaaatcctccagggataatcccagttcatccagcttcatcaggatgctgtccggatttgcacgaaacgtctctgacaattcagcaagcaatgtctctgttcctgtcgctgcggttccctgcgccggtgtcgttcccgtgacctgtgtgctctccgtcgtctcgtccgtctcctgcggcggcatcggcggcattggcgggcgttctccgctcatcatcccctgtgcattgtaagtgctgctcggcatcggaatgtccatgtccatctggctgatgcccggcacataactgtccgtagcgctgttctcttccttctgctgtgtggcctggctctcctgcatcttctgcttccactcttccagtgcttccagatatgcctcgtaacttgaactctcgaccttcataaccaattcctttctgaggtggttccttcccgaaattgtgccatcctttgcattttcctcaaaatagctatcggttccaccgcagaaaaaataacagacttcacataacattcagataaccgtcacattactccccggactgatagacaatctctccgtttatgatggtatataatatccgcgcgtcaaccgaaaacggggtgccttttagcaaaacaaaatctgcatccttcccttcttcaatgcttccgacacgatcttcggcgccgatatgccttgccgcctgaatggtaattgcccgcagcgcatcaaactcacgcatgccgttgtagattgcccgccctgcgcagagcggcagatagcgctcctcgatgaccggcgaatcggtgatgatcgacactgcacagccggcatccgccagaattgcaggcgtctcaaatcccttgttcttcaactcgtacttcgtcgcatgaccgaaggacggaccgaccgccaccggaaaatgctccgcacccaattcctttgcgatcaacgcgccgtccgtcacatgatcgagccttaaccccagatggaactcctttgcaatgcggattgccgtgcagatatcatccgcccggtgcgcatgcgctttcagcggtatctccccgcggatgaccggcagcattgcttccagttttgcatcgtaggcgggcattttgctgaagtccacctgctcctccccgctgccgcggttgatctcattccagcttgtctcacagcctgcctcccgcagctttttatcgtagatgatcgtcttctgcagcacttcccgcagttttgccgccacagacatgcgcgaatagacgcctttttccttataacagttcttcggattctctccaaatgcaattttcatggctgatttttcccggacaatcatgtcgtccacgcggtttccatacgttttgatgatgcagaaggttcctccgatcacattggagcttcccggtcctgtcgacacgcaggtaacgcctccctcccttgccatgcggaaagtctcatcctgcgggttgatcgcatctatcgccgagagctgcggtgtcaccggatcgccaagttcattgaagtcctgccccgcaaaaccgaccgcataaccgtcgagccccagatggcagtgtgcatccacaaacccgggatagacatcgatccccatcgcatcaatgacagacgcctcattgatgactttgccctccagcacaggcgcaatcttttttatttttccgtcctcaatcaaaatatccgccacaaatgcctcctcgtcgacggcattgtggatcgttccctgttttaacaataaatactgactcatcgcaatcctcctgtgttattctttccctgctctgtccttaattttttcttgcattttatagttatcctgttataatacaactaagaaatgagtttttcgaccgtacagctattgctcaagcggctcgctcgtttctttttttattctcagaatatcgtataaatacatttttccatcttcatcatggcgtattaaaatccttgcgccaaagatattatatctgcacaaatttccctcatcgttgtatataggtattgcaaaacgtgtatcataacgataccatccatattttgcatctgccacatgtttttcctcgtaattaggcgcaaatgttttaccggcggcaatttttatcattggttctacaatctgagatgcatttgcctttgcatgccgatttgcaccttttaggcttttcgtatctttggaatgcgtatattcatccggaaaatctttcccgatataaatctcatcggatgtttctaaaatctgcacgcagcttccaacatattcctttaaacactgttccactgtattccagtcaatattccttctgcttttaaatcgtaaatcattgataatgacaactttatttccttccgcatcttccacaatgtcatagtgatttcttatctcattcctcgcattgtctgtatctatatttctcgtatagtatgccagcatccttggaatatattctggcgggatccttctacctgtctcccactcctccatcgtcctgagcggaataccaaatttttgacaaaactcttttctgtttaaccctgtccggctgcgtatttcttttactgtctcacttgtttccataccagcatccccttctgccaagtcctcattgcgtggttttcttttaatttagcacaaccgctctttcctgtctatatttatatatacaaaaaccaccggggcggcacactttcgcatgccgccccggtggtttttggccttatccgccttttattataataaaaataagcatgcggatacatacataatgtatctacatgcttatagtacaagatgcaccagctccatgcagattagatgcacctgatttagatcttatttgttatgcatccgcagattgtctgcaccaacatctgcaagttatctgatcgacataaaaaatgatgcagattaagagatcagggaaaatacaataaaagcaggctgccctgcttttactgctaaatctcattattattgattgcctgcatgacgatctctgcagtaatcatgtcactttttctagagtctccaatcagaagacaactattgcatagaatatctgaaaaagaaggaaaagagcagactggagtatgaacgcataaaggctgatattgaacaggaatctggaagatatgatgattatgcggaatgggatatatctgatgttaaggaaagtgtcggtatagatacagcagggagtgttcaaaaggaatatgaaaagacagaaggggatatcagtgtatatgagggctttgaccggttctgtgagaaagagaacattcgtgatgacgaggaggaagtgttctatggtgctgcgtttgatgaatttaaccgggagtggcagggaatagcagcggaagaacagacagaaccggcttcccataaagaagagcaggagataccaccggattatacaaagatgtccatacaggagcgtgtcagacagctcccaacgccaacagatgatacttcacaggaatttgaagcatataagaacaggatgggatatgatgcggctaagatgaagagtatccgttataagatgagtgtatatgatgaattcttagaggaactggaagccagaaagaaatatcatggaacgaaggcatatggcagacggggtacaaggaagcgtgacagagagggaaggtaaaaataattttgatgaccataccatatcggcaattataaaaagtgccgatatggtataatagaaaaacaaaagttattacagggaggagaatggattgttagaagtagcaatatgcgatgatgataaggaagatcttgacaaagcggcgctgatgctggataaaattctttcagaatatcaggttcaatatcagattcggtcatttctatcggcgaatgagctgctgaacaataatgacaagattgatatcggaatactggatatttccatggaagaactgggcggaattacgctcggaagaaagctgaaagaaaaaaatcatgatataaaaattatatacattaccagttatgaagaatacatggcacaggcgattaataaggtacatgcgttttcttttttgtgtaaaccgatcaatgaagaaatgaaaacgcagattatggaaattctggggcaggagaaatgtccggaaatagaaaaggaatttgaaatactagatgaatcaggaacaaaagcaggttgtgtgcgtttgaaattaaacgagatattatattttgagtacataaaaagatccagaaaagcagcaattattctggaagattgcagatatgaatgtgaatgtacatttgaaaaccttgtggaagaattacaaccatatgattttgcggtaaatcacagaggctgtcttgtaaatctgagacatattgagaagatacagggatttcatatttatctggacaatgggaaagaactgtcccttgcacaaaaaagaagctctgatttccgggaagaaatgaataaatttttgcagaaaacccagaggagagaatagaagatggataagattttacttgcgatatgtaatggactttcctgttttattatctgtacaattctttttcaatttatgaatgaaagatataagaaaagttacagcaataaaactttgtacatagcggcagagatagcgatgggaatcactgcatttggcataaatatgctgaactttgcaatattgaatctgctgatatggtttgttggagttggtgtaacggtatattttctgtattacgaagatgcagacaggccaatccgtagaatcactgagtgtgaagtactggttttatgtatgtctgtatgtgaaacgctgggagtgcttctgttacactgttttttgcagatttgtggaatatcaaatattgatgttgtcatgcaatattgtctggaagtgacattttcaaagatagtgctgattttcctatactatgttttgataaaaagattgataaaaaggacagaagcagcctgttccagaaaacaatatatcatatatggaatcatgcttttttacagtctggtcaatatgcttgtgattgtgcagaatttcagggatgggcagaaaagctatctgtcagcggtaaatatgggctgcatcgttttggctgacttgtatcttttgtattatgtcaaaatggcagacgaaaagagatactatgaaaaccgcgtaaaggcattggagcaacaggaaaaaatgcagtatgagtattatcttgcacagactgaaaaatatagtcagacagtacggatattacatgatgtggataagcatatcagggctatcgagaatttgtatggaacagagagggagcatacggctggcgaatatgcagaggcaatcagaagtacactggcaccactgattcctatatcttacacagagaatccgatattgaacattttgctgacagataaaaatgctgtcatgcaggagaaagggatacattcggacattaagatagacaatgtagacttatcttacatagagccgatagacataacaactattttcgggaatctgctggacaatgcgattgaagctgccgcaaatgctgacggagacaaatacatttttattaaaatcagtgcctatcataagatgacggtagttcatatagaaaacagttgtggaaaggtaaaatggaaaaaacgtatgccggtatcagataagggaaaaggcagagggataggactcttaaatgtgaaacagagcatagataagtatgatggggatttacaattaaaacaggatggaaacagatttgtagcagatttgtttctgaattcatgaaaagggcggtttcgtcctttttttgtgctcaaatcgtagttggtgcaaaaaaatcgtagttggtgcagagcgtataaaatatgtgaagaatagtgccgatgaaattataaaagaatggaacatgatataagtcatattaaggatataggtgatattatgaatattttctttaacagccgaatttataccaatcagtcattcgttaatgcgctgtttggaaaacaacaaaagactacaagaagtcaagatgcaggttgcagcggtacaagagatactttaacgataagtgcatcaggaaaggaaaaacttgtaaaaaatacgaaaggaagaatacataatacaaatgttgacaaaagtattgatttgaaatcctatatagcttcagcccaaaaaacaaatcaaaaaataattgataatgcagggacacagattaatgcgaaaacaagtgaatatatgagtacaggtaaggcttttaggggagacagttatgaagatttataataatatgaatattacatattctgcaatcgaacaaaacagcagaaaaaatacaaagcaaaatattccggcagatttagaaaagaaaatgacacagtacacagatacactttctatttcaaagacagggcaggaaatctttaagcatttatcatcagttagttttatggattatgtcaatcggtttgaaaatgaagtaacagaggtatttgcaaaggaagatacgacacagggggtgaagtcagatacttttgaacatcatgtaaacagaatggcaacagcatataacaaaatgaaaaacagcattgaagaaaaatatgcggcacaagattatgagcaagagtattatgtgacggaatcgggcaaaattgaggaattaaccaaagaaaaagaactggatatgctaaatcaggcatatgaaaatcacagtaattttatggcaacttccacagaaatctggtcagaattacaggattttacaccatcggtagtttaccataaaggaagtgaacagacagcaaatgaacagaacataggtgagaaccaggagaatactgcaagatctaaagaaaatggggttatccaaaattcggcatatcaggcatttttatccgccatccagtcggataaccagaaattatcgcagcagtattcgggtgattggaaagatttaaggctaaatctgaatgtatcagatggtgatcggaaaatgcttaatggtatttgggattattatgctatggagagtgaatagattccgaatgacagaggaatgaaaataattggaggaaacgaaaatgagtatagcaggaattaacggttataattattcaaattattatacaggaacaaaaagaaacactgcgaaagcaaacggtatgaattccggtttgttatcaaatgtaagtagtacatcttctaatattacattacatatgtcgggaacggaagatagtggaaatgcattaacagcagtaggatttccggatggcagtagtgcatctgtatataaatcagatgcatatgattcggcaaacctagaatacagggtaagatattgggacaaagaaggaaattacacagatacaaatgtacagataaatgatgttgatccaagaaatgcaagttatttggaaatgcttgcatatacaacatatagtgatgtagaaggctttacgaaaaatgcttttggagatttcatgaatgcggctggtggtgtgaatggcaacatcacttatgattctgacagcataaatgaaaagaaagactatatgagcatgattaaagaatttatgcagttacaatatgattcgaacaacttatcaggttatctgtcatataaggaattgtatgattacataaatgacagaacagagaggtgattcaattaaatggaaatatcaaataattatagcacagcaaaagtgtggaacacatcgaataaaaatgtttctaaatcttctgaaaaaaacaaatggaaattaacggattctttaaaagagaagattgttgatctggcaaaaaaagatgcacaggacaatgtatatatgggaaatgcatttatgaatttgagaaagacggaagtaagcaaagtagccccgaatagagctgctttaattggaaagtttagtcaatcaatgaattcaggtaatatgtcagcaatgaaagaagttgaggaagcagacaaaaaatggctctgtatgctgtttggaataccttatgaggcaaaatatcagggaacagggacaggctcggcaattcatgtatacaatgaagatggcgaagaagttttgacctatacagggggagtaggctggcaggaaaaagaaacaaaagcagagtcacaggttcattcagcattaaaaatgacatattatgaggcatttagtgaggcgagaaaagcattaaatagtgaagaaaaggctggcagtataaacgaagacataatatcacaaggcaacttcgatatgaaagcgtaaaatgtgtgatttaataatgtgtcttatatgggaatgagcaatgtatggcaatgttcagggaacaaaaaatctaatgagtcattatgaaagtgacggtgattatgttaattataaagtgtcacgtgattaataaggaggacttgcactatgcagattaatgctaattattctgtgaatggcgtgccgtatgataataaacgtaagcagaataatatccctcaatttagtacggaatgtgcggttcaggaaaatgaaaatataaatccatatatggcagaagcagactttgatgaaaaagcatttgatatgattggaccgaatgctccacaggatgtaaaagatgcatggatggaagctgctaaggatataaatgcaaacggcatgggaataaagaaaaatggaatgttgagtcatatatcgcagatgatggtacaaaggctgaataaacagcttaaaggagatggagatgctgataacatcgacattttgggaaatacaacagagtctgcaattcaggcaacgagtcaggctctttacgatttagatcacccacgggaatatgttccgaaaagtatcgaagttcagcgagcttgtatgaaagaaagagaggtttatgttgcttttctggaaaaattagaaaaactaaaagtaagttggtagcagttagagaggataatgtatgagagacagtacactttacatcggagcgcttgcttcaaacaacgtaaataatattgtaaatgatgcgggcaaatatgatgaatacaaagaaaaggtaaaggatttgacagaagaaatccaaaccagaaaagacacttttgagaaaatggcagaaccactggtatatgtatgtgactgttatcaaaaatttaatgtagtgacagggatgcccaagagtaacttcggagattcttttggctatgatatgcagaaagatatatccagtcatatgaccgatttttatgccggaaaggtgagcaggggtgaacttaattcctattttgaggaatgttgtacttccatgcgtacctatcggacaagtcagcatcagacatccggaaccaatgaagcagataatacacaaatcgtaagtgagatgtatgaggtatttgcaaaagaaaatgcaagggcagcaagtcaggcaaactatcaggaaggaaaagcattgaatgagaaatactattctgatagtcacagtgactggacttattataattcagattattactatcaatgcaatgaaaccaatgcggcattgagggaatctgtcaagcaaatgatcgaaaaatgggatttggatgagattgactgtgataaaatcgaagcaaattccagtcttacattagatggtggttttgattttaacagcacatggaattttgagtttagaaatcaggctggcaggagcagtctggcaaaggaatcagcgataccgcctgagaattttaagatgtttttcaaggaacaggtaacatcttttacagaggacaataaatttaatggaaatctgaaaataacaatcggagagaataattacgatttaaaggttccatttcagacgttacgcaccggatcggaaggggaaatttgtaatgtctgggatttgatggaagattattatccgaagtcagaagatacctctaaagttaaaaatttcctggggaatatgtctgtatttacacggtggtatgcatatgaaacaagaattaatgacatatttggtgattatgaagtgtcacataaggagttgagttaatgggtatatcattgtcaggtataggaactgttggaaaagagcaattaatttcttcatgcagtaacggagaaccgaattggctttatattccaacaaaagggaaaagttcaaaaatgcatgcggaatttgttagtgaaattaaagaactggcacgacgagcagctacgacagcaaataagacagagtacgaatatatttccagacaggttcttggtttacgggcagaatatctatcagatgttgcacctgatagaaaacaattatatgaacaggctaaaaatactataaaaaaacaaactggcaattcgaaatgcaaaggatgtggagaattatcattattggattttttggagaaggcagaaggaaaaagcagtaattttgctgaaaagaagtttgcactggcgggaggaggaacattgaattgtccaattctaactactggtggttatggtgctgaaattcagtatcagggagtaacggtattatctaatctcggaaatggctggggctatgagatgacaccagcggaacttgcaaaaaaagatgaattttattctatttattggagcgaatataatttcgtaaaagagaatggaagttcagaattgagagagatgccggattatttggatcaggatagaccttcttttgaagccagagcataaaataaatattgtgtgcaaggaaaaaatgagcataggagcagtgccaggtggcacttttgatttttcaagtgaagtccagaactttatgataagatacataatcgaaacaattatgccgatatatagaaaagaacaggtaaacggatttacgatgtgatatgtacaaggaggacaacggatatgtcaatgaatgtaagcacaaccacggctgcttatgcaaattaccagaacaactacaagactggtatagcaaataagaaaaaagaaacagcacaaacaacagaaaatacgaaattaaaggaaaatacaactgaaagcatcgctgaaaaaaatctcagtaaagcggcacaaaaaatgctggagaatttgcgtggatcaagaaacgacatggattttatggttgctgattttgaaaatggtgataatgccaaggatcttttagcccaaagcgacaaggagtatacggttattttctcaaaagaagaaatggagaagatggcgtctgatccgaaatattatgctgaaaaaatgcatagcattgatggcgctttgcgtatgtcagatgaaatcaatgcccagttcggctttgaaagagcatttggtaagactaacggtggtgtagatgctgatacaaaaataacaaaatttggcatctcttttaatagtgacggaactacaaccttctttgcacaactggaaaaatcatcagccagccagaaagaatatcttgaaaagcttcaggaaaagaaagctgaggagaaaaaagaggcaaagaaaaaagaacagtccaagcaaatcgaagtacgaaaaactacagttcaggcaaattcaaaagaagaagttttggataagatcaaaaacattgactgggattctatcaaaccggaggaaaataaaatcggcggaaggtttgatttttcaatctagtgaatttggaacagatgaaatatatgccaatatggaggaatatattatgcagataacaagagataattattcgcaatatgctcaaatggttcagcagatgttcgggaaaaaagcaagttcaaatgatccgttagcacaatgtgattatggtaatttctcattaagatttaagcctgtggacattaattttaccaaaccaaactgggatactatcatgacaaaacgagataaaccagcgatgtcagaggaagaatttgacgaagcaataaaagaacttgcaagaaaagagtttgctactggaaaaagggatgatgatgcttatcgaaaattgtgtatgcagcatggagaaacagtatctcctgatagaaaggctatatatgaatcaagcatgaaaaaaactggtggcaaaatgaatgctgcatgtatgttttgggattcaaaaggtaataaaacgctttcttataatccagagtcaagaaactggaaagctataagtacagatgaagaatttgcaagagcaagagtgtttacatcaatttataatgatgagttagcccgtttgaaggaagagtatggcgaaaaagcgaaaggaaatgtttcttatagcaaaataaaggcagatatatccgcagaggaatcaaaggaaaagaacaataatgaaggaaatactattgatttgcagatttagattgttgattgcgttttagtaaatagtagataaaaaacggaaagatattcatcgctggtagcggcattgagttcataaattactactactctagataaaagtagtattccgataagttaaaagataaagcagatgcaaatagacacgaatcccagcgtataccaatgaaggagtttgcttcatttctttaatattgcagacatgattagaagacagggcagtgaaccaataatggtttgctgtccttttcacaacaaaaaaaggtcatttcacaacaactgtgtcagagaccatctgtttgtccgatataataaatatatttatcagacaaaaaggaagtgacaatatgcgaattgctatctgcgatgatgaagtatctatggttcagatattggaggaaaaaataaaaaggttattgccggatgcggttatagagaaatatttatcgggtgagaaactgattgcaagtggcagtaagccggatgttctatttctggatattcagatgccgggaatggatggaatggaaacggcaaagatgcttcggcaggacaatgaggatatgatactcatttttgtgacagcagcagaggagtatgtttttcaggcatttgatgtcggagcatttcattatctggtgaagccattttccgatgaaaaattgaaagaggttgtgacaaaggcagtccatgccgtaaaaaggagttccagacttgaaaaagacgaaaaatatatcatggtacagaccgccggaagccatataaaaatttttctgcgtgatattgtgtatgctgaggtgtttaaccggaaagttattatccatacacgaaatacggatattgaatactacggaaagctgcaggatttgcagaatatggctggggaagatttcttccgaacacacagagcataccttgtacattttaaatatgtagaaaaatatgatgcaacttgtgtgactatgaaaaatggaactgcattgattgcaaaacagaactatccggagtttgtcaggaggtatctgaaatacaaccagaggaaaggaaatgaagtcagatgagtttcgtggaaagatgctggatgatcacatcgaagttttctgttattgcaattttgattcttacaggaatctgttttggtgtttttgtatacccatatatgaaaaagaaaagggaagctgctctggtcagtattgtttatattggaattatgtctgtgctgtatctgataccgcagcggattggcaatttttctgcatatttgatgggagttgtggctgcatttcttgtgatgtatgtacaggacagacgaaacatctatcagaaactatttcttgcagtgacattcttttctatccgttggcttgcggttgcaatggcaggcagactggatgattttatcacaaaagctctggtttttgggaatacgattgccggaagacaatggctgcaatatggactttatgctggaacaagaattctggatattgtgctctgcatcgttttccttgcagtcgcaatcggtctgatcaataaagcctatgtatacaaaaaagatgagatgagcggcaaagagctggtaatgctcatcatgccttctctcgtaggtgtaacaggatatggtattctgcaatattatctgaatatttatgaaaaggatataggaaagagcctgattgatacgtatggattttatggagctttaagcttcgtgcattattttatctctatcatagcaattcttgttatgacaatcatgtttcaaaactggaaggtggcacaggaagaacagacagggcaggaactggtattaaatcaggtcagtgatatgaaaaagcatatcggggaagtggaaaagctgtatcaggatatccgcagcctgcgtcatgacatggggaatcatatacagatactggaacatcttgtggcagagaaccatatggatgatgcagcagaatatatggagcatttgaaaaaggagtggaatgaaatatctcctgagataaaaacggggagtcctgtccttgatgtgattttcatggaaaagttaagagaagcgaaggagaggcagattcgttttacatcagattttcattatccgaaggatacgaaattaaatgcatttgatttgagcgtgattttgaacaatgcacttaacaattgtatggagaatgttagtggtgaaaatccttatatcagtattacgtcttttcggaaaaacagtatttttatgataactataaaaaacagttacgagggcacattaaaatataaggaaagcgatctgccggaaacaaagaaatccgggaaggagcatggaattggactgcataatatccgaagggttgcaaggatgtatctgggagatatctctttagagcaggagaatcaggaagtggttctaagtattatgttacaggtagaataaaaagaagtagtatttcaggaaaggcactaacaataagaagttagtgctttttatttgcttcacaacaaaaaaagggcggttcacaacatcgctgtttattgtaaagaaagatatgccgaaaaatcagtaaagagaaatcatgttgtacagatttttaaggaaacggatttcagaatttaagttcaaggagtctaaatcctctcctcaccagtgggttcggattttgctccgcaaaacaaggaggattaaatgagaattaatggatttagtgggacaaatatgcagtcagggacaatgggaatggcacaggggaatgattctgtaagtaaaaatattcagaatcagattgcaaatgccaaacagaagctacaggacttatcatcgaatgaagaaatgtcattagaggataagatgaaaaagcgtcaggagatacagcaggagattaacaatctcaatcagcagttaagacagcaccagatcgagcagagaaaggaacagcagagtaaaaattcgtcatctatggatgatatggtggctggaacaaataacacttcgaaaaagaaaggcaccggattgtccaaggcaagtatgcaggcaatgatctccgcagattcttccatgaaacaggcaaaggtgcagggcagtatggcaacacagatagaaggacgtgccagtgtgcttgaatctgaaatcaaacaggatgccggaaaaggaaataccgagaagaaggaagaagaactggcagagcttaaggcaaaggcacagtctgcgacagcagcacagatgtctacacttgctgatgcaaataaatcagtagaagaagctgcaaaagcggataacagcaatacagaaggcacagcaacaaagaataatactgaaaaatctgagaaaacacagaaagctacaggagcagcagaggagacagacagcgtaaagaatacggatatcaaaagggaaacacaggtgacagtagaaacaccgactccggaaaatgcacagaatgcaacacaacaggcagtatatacaccgattgatattcgcttatagttggtaaaggagaatgggattatgtcagagattaagagttttagtgattacacaagtaaatataacagcaatgtagattattccgcattatttggcggaacttccgacagttcatccgtaggaaacaccaatatgctttctgattatgctgcaattaaaaacggaagctatggaaaacttatgaaagcatattatgcaaagcaggatgcagaaaaattatcggggaaaggcgatacttcacagaagcttacactgatgaaaacaagtgcggattccctgaaaaaatcagcagatgcactaaacgatgcgtcactctgggaaaaaaagaaaattaaaaagaaggatgaaaagaccggggaagaaacagaggtagaggattatgactgggatgcaattaccaaaaaagtgaaagcttttattgatgattataatgacgttgttaaggaggcaggagaatccaatacaaaagatgtcctcagaaatgcttcatggatgacaggcatgacagacaaaaccagtcatttactttctaaaataggtattaccataggaaaggggaataagctggagctggatgaagatgcattgaagaaagcagatatcagttcattgaaaacggtttttacaggttacaattcctttgcaggcaaaacagcccagaaagcagctggtatatcaaatgctgcaaaccgcgcaagtgtgacttatacaaacaatggtacatatttgaaaacggattcctctctaacgtcaggtaagatagataaggaagtataatggttatttcgaccagaaagcatgacgattacaaaatcagtgggaaatatgtctgctgatttttttattacaaaaaaaaggtcggttcgttacatttgagtagataataaatgaagaaagggcgatataaaaaacagataaataaaatttcagggaaaggataataggataatgaagattcaaaatgatacaggtgttacctatgctgcaaacacgaatcgttatagcaacacacaaaatgctggcagcaaaacgggcagaacatataagaatgcccatgaatataagaactatttaacacaaaaatatgattgcttaagaagcaaagattattccgtaaatataaacagctctcttttgtcagaggctatgggagatgaaaagacaaaacaatggctggagtacaatttatcgctaataccaaaaacaatagaacagtcagaagcttatgtggcagcaagaggagcaaagatactgagttatagtattactataaatggatatgatagcatgagttctgtaatgtgtactcaggatgaggctgatccaggaacagaaaaagcaaggaaagaacttgaagaaagacttgaaaaaagaaaagcagaaaagaaagagacagaagaacggctggaaaaacagcgtgccgaaaaacaggagcaggaagaacggcaatataatctgagaatagatggcaaagatgtggcagatctgacaggaaaactggtggaactgctaggtacttcaacatctataggagtgatggaaagcggaacatcgtcatttgatgcgttggcatagaagcgttgaaaaggagcaatattgatttagttgttggaagaaaaacactgataaagttcagaaagaaactagtcagacaaagtaaaaacagataggaaggtaagattatggcaatcacaggatcccaacaacggtatctgtatcaagtgcatttttaaagaagtgcatgaatgacccagaaaaagcaaaatatttggaagaaaatttagcggctattccggattgtgccaaaagtgcagttgctggttgtcagggaaccttgacaaatcttagttatcagattgatgcaacacaaatttacacgaaataatccaagaacagaaagcgaaggagaagcagaaaaattcatagtataattgtgacacttatggtaaaatcgcatcagatgtcgaaagatatctgatacgaagagaaaaggacgagaaatatgaacaaaagtgtcagtattattacggatttggatggttcaaaaatagcccttattaatgatataagatttaagtcgaggaaggggatagattggaatgaagtagagcagtatctgaaagaatatattggagaatactttgaaatatccgaaacctcagagaaaatatatatcggttctgattttccagatgagttcagtcattcaaatgatacaaagggattaaaaggtgctaatatgaaagcgaaagcaaacattacgcctgctattggtgaacttatccagattgcttctgaaaaggcacagtatcctgattataagaataaacatggggcaaaggcacaatttggatggtatcgttataatacaagatttggaataccggtttatgatgaagatggaaatctggagcgttataacattttttcaacaagaatgcttgtaagatgtgatgcagatggaaaactttatctatatgatttggtaagaacaaaaaaagaaacgagcaagccgcatgagcaatagctgtacggtagtaaacttcgtttcttcctaacacctatagtaaaggtatatgtattgtttgtcaagaagaaaatcttgaaaggatgtgatttcatggcatacagccagcaactttgggacgaagcaaaaagaaaatgtaagcttggggaagaagaaataagaatggcaaaagaaatgaggcttaatcccaagagccacaaaaggaaaaaataacatttaactaagccgttatggagagtacatcttcatggcggctttttttgttggcatttgaaagaaggtgagaaaattgaaaatcaaaaaggttgataaagcaaagaagggaatgttcaggcagtatcgggcagcattaaaggaatccaagcagtccattaagacaaaaaattcttccattaagatgagcattcgcaactgtgtctgcacttggaaactcggaaagcagggcatagacggaagccatatgaagtgtaggaacgaggtttcccaattcgggaaaaaggatacaaacaagtctggaaacggaagatttcagttttgctcgttctccagctaacggaatatcccactgaaaaagcggtcggcgaggcgcagcaggaaagctgccccgaccgctctgccaacagcactccttgcggcaggagaggattgtggcgattccgaagtcagttcacgcggagcgcatccagcagaatttcaatgtgaataattttgttctgtctcctgcggatatggtgcagattggctccgatatcacttcggttccagattcaccgccgggcggaagaaaatccactgtagtatctgctttgcgcatattaggaggacacgattctggaggcgttttcttttccttacacggacagatgatattttcccatccagtcattgagctggataaaatatgccataagctggggtcccgccatgagctgaccgaaccacggtctgccaagctccttgggagcggcgaggaatgccttggctttttttggatcgatcagcgggtagaccggcgcgttcggatcgcttatgatccggcgcaggtgatccgcgagaagcttctcgtagcccgggtggtaagtcttcgggtacgggctttttttgcggtgcagcagttctgccggaagcagatccgcgcaggcgtcgcgcagcagcgttttttccacgccgttctgatacttcatgctccacggcacgttgaagacgtactccatgatgcggtggtcagcaaagggaacgcgcgcttccagaccggagtacatgctggtgcggtccatgcggtcgaggagcgtctgcatgaaccacttgatattcaggtagccgacggcacgcctgcgggcttcctcgggcgattcgccgggaagcttcggggaagcacttatagtctcttcatagcgggcgcgcgagtaaccggcgagatccaggcggtcagtcacgtcgccggacaggaatgcggcgcgcgcagagacatcggcagaccacggaaaaccgtcacggtttaaaagctccgggcggtagaaccagggatagccgccgaagatttcatcggcacattctccggtcagtgtgactttgttgtgtctggcgaccagagaacagaagtagagcagagaggcatccacatcggtcatgccgggaagatccctggcgtcgaccgccgaaaaaagtgcctcataaagcgtgctctgggagcattccagataggtgtggtgcgtctggcagtgggcgagcatgatgttgacgtagggcagatcgcgctcgggctgaaaggcgtttgactggaaatatttatcgttttccgcaaaatcaaaagagaacgtatttagagtctgcccgtccttttgcatgcagcctgcggcgatcgcggttacgatggaagagtcgatgccgccggagagaaaggtgcagaccgggacgtccgagaccatctgccgctttacggcatcgcgcaccagataagagaccatctccaccgttttttcataggaatcggtgtgcggggcggcggtaagatcccagtagcacacctgcttcgtgccctcccgggagaaaatctgataatgaccggggagaacctcgtgcatgccggaaaaaatgccgttgccgggtgtgcgtgccggaccgatggacagaagctccaacaggctgttttcatcgatggtgggcgtgatatccgggtggcagaagagcgcttttggctcggagccaaagaccagtgtgccgcccggggtgctgtagaagagcggtttggtaccggcacggtcacggtacaaaagcagttcaccggttccgccgtcccagatcgcaaaggcaaaaatgccgttcaggcggctgacaaaatccctcccatagtgcagataggcgcagagaatgacttccgtgtcggaagtggtggaaaaagtatacccggcggcgagaagcggcggcagcagttcgtcggtgttgtagatctcgccattgtagacgatcgcgcaggtgcgtcccccgtcctgccggatcatgggctgactgccgcccgcaatatcgcggatgctgagtctggcgtgggaaagccccacatgcgtgtctaaataggtgccgaaactgtcgctgccgcggtgggcaagtgtgtgatgcatgtcggtgagaatctgttcccagaggacgggttcctttttaaaatttttagaaaagtcgcagaaaccggagattccgcacatataaaatactcctttcatgggagaatgcaccggcaggctgccgcgcattcagatactggaatagtgtatgccgcgcaaacggaaattatgagccggcagaaaacgggtacttgcgcatctcacgtaaaccgctataatagagaagaatgtgaaagggtgagagatacttatgaacgagaaaaagaacgagctccagatgtcagaggcatttctgaccagtatttttctggcggtctctggcggatttcaggatgcctatacctataatacgagggaggaggtcttctccaatgcccagaccggcaacgtggtgctgatgagtcagaattttatggtgggcagatggatggacggactgcgctatctgttcccgctgctggcgtttgcgtttggcgtgttttttgcggagcgcatacaggggcgtttcaaatacgcgaagcggcttcactggagacagggaattctgctgcttgagattgtgattttatttgcagtgggatttatcccgcaggaatacaatatggcggcgacggtgttagtgtcctttgcctgcgcgatgcaggtgcagacgttccgcaaggtaaacggatattcgtatgcgagcacgatgtgcatcggcaatctgcggagcggtacggcggcattttccatgtatctgcgggacaagagaccggaacagttaagacagtcgctctactatttcggaatcattctcttctttgcgatcggggcgggcatcggaggcaatctgtccatgcgctacggcattcacatgatctgggtgtcggtgggatgtcttctggtcagcttctttatgatgttttttgagcgggtgaaataaaaaacagacaaaaacggaatacacgcagacataacggtctctgcggcggcatctaatagaaataagatgttgttgcggagattttttatgccgaacgaaaaaatggagaacctgctgaatctggcgctggcggcgacacaggaggagcgggagaagtcgctggagctggacatcggctacgacagtgccgaacagacgtgggaggtcattgtaaaatttgtcgggacaacggaggagcttgaggcgctcctttttaaaaattttccggaggaatatccgcggattcaactgacaaatctgcagaatgaatatgccgttttagtgctgccggaacatctcgtggagccggtggcagcgctggataaaatcgagtacatggaaaagccgaaacttttatttttcgcggtggacaatggaaagcgtgcatcctgcattacgcagctgcaggagagaaccggcctgtcgggtgccggtgtccttgtggcggttattgattccggcatcgattacgcgcatccggattttaggagggcggacggtacgacccgcattgtcagtctctgggatcagacgatcccggcgtccgggggcttgtcggcgccggcggggtatttccttggaaccgagtacgatgaggcgcgcatcaacgaggcgctcgcgcagcccacggaacagcagcggtatgcggtctgcccgagcagggatgcatcgggacacgggacacacgtggcgggaattgccgccggcaacggaagagcatcggagggaagataccgcggtgtggcgtatgagagcgatcttttgattgtaaagctcggcaaccagcgggagggggcgttcccgcggacgacggaactgatgcaggcggtggattactgccttagaaaagcgcaggagcggcagcagccggtcgccatcaacttaagctttgggaataattacggaagccacacgggaacgtcgctcattgagacttatctggatgatctcgcaaactactggaagagctcgatcgtgatcggaagcgggaatgagggagcggctgccacgcacacggcgggagcgcttggaatggggcaggcggaaaatgtagagttcgcggtgagcgcgtacgagagcgccttaaatcttcagatctggaaatcctatgcggatgagatggcggtgcttctcattcatccgggcggcatgcagatcggaccgatccgccagatacagggatcgcagcgttttacgctggggcagacgcagattctgctctactatggagagccgagcccatacagcccttaccaggagatctacctggatttccttcccgtgcgcgactatgtggacagtggaatctggacggtgcgcctgattccgcagcgcatcgtcacggggcgctatgatatgtggttcccggcgggaggcgttttaaacgaaggcaccggattccttctgccgcgggaggagacaacgcttaccattccgtccactgcggcgaaggtgattacggtcggggcgtacgacgcgcggttcgggcagctggctggattttcaggcagaggatttaccggaaacggacaggtcaagccggatctggcagcgccgggcgtggagatcacctcctgtgcgccgggcggaggctatacggcgcgttccggaacttcgatggcaactccgtttgtgacggggagcgccgcgcttctgatggagtgggggattgtgcgcggaaacgatgtgtacctgtacggagaaaaaataaaggcgtacctgatccgcggtgcgcgcccgctgggaggaggaagagcttctggtctgctgcaggaatatccgaatccgcaggtggggtggggaactttatgtttgtcggacagtctgccggagtagggaaaacaaaagaattgtggaagtgcgaaaaaagacgaaaaaagaagacaagggaaattgtgcagtatttcaaagaaagataaacaaaatataaattaattgtgaaaaataaatgagaaaattgaaatttatgttatacttttaacaaaataaaaaacatacagtatattttatgaggatggctggtgaaaaccggcggtttcagcttactgcgcggtaatgaaattttgttaaaggagaccgaagtggagtgaatgatattgtttatcagcatgaagtgatcgttccggacaggggacttccgtttaagctgtttctctttgagggcggcggcggaaaatacatcagggagaagcactggcaccgttctatcgagatatttgccgtgagacaggggcagcttgattttttcctgaatgagaaaaaatatgtgcttgcagcgggggagtttgtgctggtgaatagcaatgaggtgcatgcgatccatgcccctctgccaaacgagacgattgtgctgcagattccgcttggcgtctttgcggattattatacggaagaacagtttatctggttttcgcacagcggaaaagaggatgaccgtcaggtgttttcactgctcgagataatgtttgtggcgtacggtgagaaacagaccggttacgaattaaaaatgctaagctgtttttatcagctggagtatcttctggtgacaagataccggaagcttgaggtgggcgaagagatacttaagaacaataagcagcttaagcgtctcggaaggattaccgggtatctgaaggagcattatacggaggatgtttcgctggaaaaactggcggggatttttggttattcaccggcgtatctctcccggatgtttcaaaaatatgcgaagatcaattacaaggaatacctgtcgagtgtgcgtctggagcatgccgtgagggatctggaagagacggatcttgcgattggcgagattgcattaaaccacggctttccaaacagcaaggcattttccaacctgttccggaagcggtacggaatgctgccgaatcaataccggaagacagtcacatcagaaaaagaacggttctcctcatattacttaccgcataaaggcagccgtttatttctgatgtgacggcttccggtaaaacgctccgcgggggcaggggcaagaacactaatttatcgtagtaatatctatagtttctcccgcgtatccggaaggagatctgtgctaccatagatgtatataaaataaaatggcaggaggagcacagaatgacaggaccagtggcaccgagagacccggaaaaagcaagagcacatttttatattatgcgtggaaaagagatctgcggactgaagcagggagatggcaaagcagtgcagttcatctatgaaagtgacggccgtctggcaaacagtgcacagattgtcggaaatatcacggatggcagaatacttgaactgctcggtacagtgaaaggcttccgcacgcttgtacacagtattggtgtgtcggttgagatggagcatccggctgaaaagatagaatttgtttttcagatgtacggcaaaaaggatttgtatgggggcggaacgaatctggtggcaacactgcagggagatgggatggaacagaggatctgtctgtcggattatgaatggagtctggatgatgatgtgcccggacagatccgctttacatttgaccagccggaacgggtgggaaaggcagatgtccgtttttatttaaacgacggatttacggcaccggaagatctgacagaagaaaaagtggatctccattcggaagaatattataagatggtgcagcgctctcttatgaacctgggaaatacctaccgcatccggaaagtgattgagaaagcgcgagccggaaaagaagtgacgcttgcttttatcggagggtccatcacacagggggcaggggcagtgccgattcacacagagtgttatgcatataagtcatatcagctgtttcagaaacgatttgcacggaacaataatgtcagattcatcaaggcgggagtaggaggaaccccatcggagcttggaatgatccgttttgacagagatgtgttgcgtgagggggaacagccggatcttgttgtaatcgagtttgcggtgaatgatgagggagatgagaccaaaggggactgctatgagagtctggtgcgtaaggtattgaagctgccgtggagacctgcggtggtactcttgttttccgtatttgcaaatgactggaatcttcaggaacgtctgcagccggtgggaagacagtacgaccttccgatggtaagtattctggatgcggttaccccgcagttttccggaaaagaacagaaaagagtgattacgaagaaccagtttttttatgacatgtttcatccgaccaaccttggacataccattatggcagattgtctggaatacctgatggaggtatgtgatacgtccgaccatgcgagggtggacagcttccggcagggcatgacggaggaggaagtcttagaacagtgtctgcacggggagcctgcgatcggcaattcgtttgaaaaagtaaaactcttagaccggcgggacggatatgagggcgccagtatgagagagggaggctttgatgcgacagatcacgaactgcagtgtgtggaaatggatcaggatctttgcactacgccggaattcccatataactggatgtatgatggaactaagccggatcgggcgttttttgaactgacgatcacatgcagagcgttatttctgatatttaaggattccggcgaggtggatgccgggacagcggatgtgctggtggatggggaattccggttcacagcagatccacatgtcaataactggctgcactgtaatgcggtgctcgtatttcaggagaaggaaacggcagcacataccgtgagaatccagatgagcggtgagaatctggataagaaatttacgattctcggatttggatatgtggagtaggggggaaaagctatggttacagttaagaatccgattttgacgggattttatccggacccgtcgatctgccgggtaggagaagatttctatctggtaacatccagttttgcatatgcaccaggtgttccgctgtttcacagcagggatctggcacattgggagcaaatcggaaatattctgcagagaaaagagcagcttgctgttgggggagaggagatttccaggggaatctatgcgccgaccatccgataccataagggtatttattatatgattaccacaaatgtcagctatggaggtaattttattgtgacggcggagcacccggagggaccgtggtcagatccctgttgtctgggagaagaagcagccgggattgatcccagcctgttttttgatgaggatggcaggtgttattattgcggaaccagaccgaatcccgatggagtaaggtacaatggggactgggagatctgggtgcaggaactggatctgacgacgaagaagctggtcggagagagtatggcaatctggaaaggggctgtgagaggggcaatctggccggagggaccacatctgtacaaaaaagacggctattattatctgctgcatgcagaaggaggaaccggaccggaacacagcatcagtgtggcgagaagccgaaagctgtttcaatggtttgagggatgcccgcgcaatccgatctttacacatcggaatcttggggcggattatcctgtggtctatgctgggcatggggatctggtggaggatcaaaacgggaactggtatgtggtgatgctcgccacgagacgctgtaagaaccatggaagtatggggcgcgagacttttctggcaaaagttgtatggcaggatggatggccggtaattgctgccggaaccggacgtctggagaagacactggaagtgccgctaaaagagtaccggtttccggaagaaacaggaacgtgcgataccctgtgtttctgggagacgagaccggatcagaggctgcttgggatcgggggaagaaatgaggcatcctattcgctgacagaaaaacgcggtgtattccgcttatactgtggaaaacagacgatcggtgaaaaaggatgcagcagttatttcggactccggcagaaaagctatcatttccatgcagcggtcagattccgctttgaaccacagtcggaggatgagacggcgggaatggtattataccagaaccatgagaatcatctgaggatggagatcgggaaaaagggaacagatgtctgctttcgggtgagcacatatgttcatgccagggaagaggtcatccgtgaagttcttctgaaagaagagcaggagttatgggagattctgatccgcggagaggagcagagtgcgggtatctgggtaaggctgggagaaaaaatgatctgtgcctgcgataaggtcagcctgcttgcatataccacggaagaggcgggaggctttgtgggatgcaccattggaatgtacgcgtcttcgcatggaactgacagtaaaaattatgcggattatgtgagctttacgtgcagtggagcagaagaatagagcaaaaggagagggagagatgagtctggagacgaaagaatatgcaaaaagactggtggaacagatgacgttggaggagaagatcagccagatgcgctatgaatcaccggcgattgagcggctgcatattccggcgtataactggtggaatgaggcgcttcacggagtggcaagatccggtgtggcgacaatgttcccacaggcaattgccctggcagcgacttttgatgaagaactgattgagaagatcggagatgtggtgtccaccgagggacgggcaaagtttgaagcgtattcaggaagaggagacagaggtatttataaaggtctgactttctgggcgccgaatattaacatttttagagatccacgctgggggagaggacatgagacgtacggggaggatccctgtctgacggcaaagcttggctgtgcgtatatcagagggattcagggcaaagatccggatcatttaaaggcggctgcgtgtgccaagcattttgccgtgcacagcggtccggaagcattgcgccatgagtttgatgcaaaggtgtcgctgcacgatttgtacgatacgtatttgtatgcatttaagcggtgtgtcaaggatgccggtgtggaagccgtgatgggcgcttataaccgcgtcaacggggaaccggcgtgcggaagcaagacacttctgcaggatattttaagaaaacaattcggttttgagggacacgtagtgtccgactgctgggcaattcttgattttcatgagaaccatcatgtgacaaagacggtagaagaatctgcggcaatggctgtcaaccatggctgtgatttaaactgcgggaaggcatttttgtatttaagccgtgcctgtgaacagggactggtggaggaaaagacgatcacagaagcggtggagcgcctgatggatgttagaatccggctggggatgatggaggattatccgtctccatatgcgaacattccttatgatgtggtggagtgccccgaacatattgcactgtccttagaagcctcgaaaagaagtatggtgctgcttaagaatgacaaccattttcttccgctgaagcaggaacaggtccataccattgcagtgatcggaccaaacgcgaactccagagcagcgctggttggaaattatgaggggacatcctccagatacattacaccgctggagggaattcaggaatacaccggagagaaaacccgcgtcctatatgcgcagggctgccatctgtataaggatcaggtagaattcctcggggagccgaaggaccggtttaaggaagcgctgattgctgcggagcgggcagatgtcattgtgatgtgtctgggattggatgcgggcatcgaaggcgaagagggagatgcgggaaatgagtatgccagcggtgacaagctgggattaaagcttcccggactgcagcaggaacttttagaggcggtcgcagcagtcggaaaaccgattgtgctcaccgtgctggcgggaagtgcactggatctgtcgtgggcgcaggaacatgcacagatacgggcaatactggattgctggtacccgggagcgagaggtggaaaagcaatcgcagaggcattgttcggagaattctctccatgcggaaaactgccggttaccttttatgaaggaacggaatttcttccggattttacggattattccatggcaggacgtacctaccggtatacggacagacatgtgctctatccgtttggatatggtcttacctattcgcagatccgttattctgatgcacatgcagatgtcacagattttggaatactggagccggtaacggtgcatgtaacggtggagaataccggtacctacccggtacaggaagcggtacaggtatatgtcagattcagtgaaagagaagcttacgatcccggctatcagctgaagggaatccggtcggttgcactggaatgtggggaaaagaaagaggtttgtatcaccctttctacgcgtgattttgcactgatctccgaggagggaaaatgtctggtacacccgggaagctatgagatcgcagtcggagggcagcagccggatgagagaagcagccgtctgaccggacagacggtgagcacactttttatatgcaaaacgggaaatgtgacggaagtggaatactgatgctgccggtatccgttgcactcgatgaaaaacaatgttagtataaaaatactgggagaggatatgaagagaattctgcatgcggttgaagcctggatggatgactttaaaataaaaaataaattttatatcctgtatatcttgtgcgtgctggttccgctgattgtgacggacagtgcggtattttctgttgtcatgaagtctgagcgggaagccagagagcatgagatggcgaatattgccaatgcagttgcatacagtatttcaaatacggtcaacaatgcagcagagatcgggaagagtatttatacgagcaaatatattaaccgtttttggcgaatacctacagcgatccgttggactatgtggtgagttatcaggatttttttaaagataccctgtttgagagcggacttggcatgaacaacatggtaatcacgatgtatgcggataatgacacgatcgtgaatgggggaaaggtatgtaatatgaaggaaatacgcggtacagaagtgtaccgctattttcaggataacggattgaataagggattatatttccagtatgatgacagcagggcaccttcggtggagccgcagagacggatgctttttttccagaagctggacttttatgcggaaaataatatggaaaaggtgctgctgatcaacatcgattacagtgcagtaaaccggacattagagaaaatgaattatgacacggatgtatttatctgccagggagataagattgtcttatcaaatggcagatattccagtatcggaaaggaatttcagacatttgaccagacgggcagggtcggatactgtcaggaactcgagttttacggaatggatctggatatttatgtcatgcagcccaaacgccagctgtggacggaaatccggaaaaacctgccgctgattggattcttaattgttgtaaatgcgattctgccactccttctggtgcggggatttaaccggtcatttacgcagagaatcagcgaactcagcaaagtgtttgagacagtcggcggggaacatctggtgccgatttcgtatgtgcgtggaaaagatgagattggaagcctgatgagcaattacaaccgcatggttgcgagaacaaatgaactcattcagattgtgtataagaataagattaaagaacaggagatgctggtggaaagacagaatgcagaactgctcgcgctgcacagccagatcaatccgcattttctgtttaatgcgttggagagcatccgcatgcacagcctgttgaaaaacgaatatgagacggcagacatggtggaaaagctggcgctgatgcagcgtcagtatgtggaatggggaaacgacagtgtcgagatccgcagggaaatggaatttgtgagagcgtatctggggcttcagaagtatcggtttggagagcggttaagttacagtcttgaagtggaagaggattgtctggacattaaaattcccaaaatgacagttgtcacctttgtggaaaatgcctgtgtacatggaattgaggcaaagacagctcccggctggatttttgtgcggatctgccaaaagcagaaggcactttatctggaagtggaagataccggatgcggcatggacgcctcccagatgcaggaattaaaagagcgcatgctaaacgccagtattgatatgctaaaggatggcggaagagtgggaatcatcaatgcatgtctgcggctgaaaatggtattcggggagcaggtggcatttgatatagagggggagcagggtgtcggtacgacagtgagtatccgtatgccattgtagagaagggaaggaaaaagatgggggaagcattgttaaaggtattgctcgtggatgatgagccgtttatattacagggactgaagatactgattgactgggagcaggagggatttgaagttgttaagacggcggcaaacggagaggaagcactggaatatctgcgcggggagcaggtagatctcattattgcggatataaaaatgccggtcgtcacaggactggaacttctggagaaaatccgcggggaaaagatttccgatgcacattttgtaatcctgagcggatatgcagattttgagtatgcgagaaaggcgatccgttacgactgcacagattatattttgaaaccggtagaccgggaagaattgctgaaggtgctgaataaagtccaggtattgcgaagggcggacaaccagaagaagcaaagcagccgggaaatggagcaggcgtatctgtccagacatctgatcgcattgattcagggaaagtttgacagtgtgaatctggagtatgtgaagtcgcatatggatggggcatccggtatacggtatgtagagattcagatggatgatgacggcagagctgaggaaatatcagataaggaaaaacggggctttcagcggcagctgtaccagtattgtattgagttcctgggaccccatgcatcacattgtgtctttgatgtctcaacgcatgagaagatttatgacattgggttattgtattgtgatgcgtttgctaaggagcaggggattgatgggaaaacatatctgaaccggtttcttgagtatctgattgctaacatgcaccagccggtcatcatgcttgtagggaaaaaggtgcaggatatcagcaacattgccagatcttatggaaatgcgtgtatgctccggtcttttcagggattccgcgcaaaaaagccgatctattactatgaggaggaagtgcaggttacttccggaggaattgttttatgcaagagcagtctggatcgtctgttaaaagctgtggagcagaacaaccatgtagagatacggagtgcgattgagcagttttacggggagatgataagcagggaaatgaccggtgagacgatgaatctgaacatcaattatcttctgtttcagctgatccatctggcgagtgagcaggatgatggggtaaatcaggaagagattctgcgcctgatcagtgagagcagctttgaaaagggggtaatgcgcggcagcaaggcgcatctgacccggtttgcatgtgaatacggtgactatctgtcgcagcttcgcaaaaatgtatccagaggagtgctaggagagattgagcgtgagatccgggaaaactatgcaaagaatatcacattaaagagcctgagtgaaaaatattacgttaacagcgcatatctgggacagctgttccgtaagaaaaacgggcagtcattcaaagattatctgaataattacagaatggaacgggcagcggatctgctgttacataccgataagaagattgtcgagattgcggaggaagttgggtatcatgatcttgattattttgtgaaccgttttattctggtaaaaggctgtacaccggcgaagttccggcgtgaggcataaaggaaatacggcaagttcaaaagcagggcaaagtatggaaataagaacctatactttgccctgcttttatctatacttcctccaattgtctgaagctgccagaaaggtaaaatagtattatcaaatagggaggtagttacaagatgaagagaaggaaacttatcagtgtattgctggcagccacaatgatggcagccatgtttgccggatgcgggagtgatgcggcatcgacagacgcaaaggaaaacgcagacggtgcagacagcacggaagccggtggggtaaaagaatttacggctttttttgcagttcccggttcagagatcaatgacgacaatgagattcagcagatcattgccgataagaccggcgtgaaagtgaaggaaacatggctgaccggacagacggcagaggaagctgtcggcatgatgatcaccggtggtgagctgccggactttatctgcgggggaagcggacagtcacagctctatgatgcagacgttctggtagcactcgatgattatctggatgattatccgaatatcaaaaacttctttacacagcagcagtgggatcagcttcgccaggacgacggacatatctactggataccgcagttcagcaatatcaagggagaagagaaggtttgtacacacaacgatgaggcattctggattcaggccagggtattaaaatgggcggattatccggagatccgtaccatggatcagtattttgatctgattgagagatataatgaggcaaatccgaccatggaagacggaacagagaacattccgtatacgattctctgcgatgactggagatatttctgccttgagaatgcgccgcagtttctggatggatatccaaacgacggctcctgtatcgtagatccggagacattgacggtgatcgattataatacgacggataccgcagtaaagtatttccagaaattgaatgaagaatatcagaagggaattgtagatccggaatcctttacacagacctatgatgagtatattgccaaactgtcaaccggacgtgtacttggcatgattgaccagtggtgggattttgcttacactgcgggagatgcaatcaagcaggcagggctggatgcacagggatgcgattacattccgcttccgattaccattgatgagagtgtcaaaaaccagtggcactgttccggcggtgtgttaaatgtatcagacggtcttgcgatcaccacaagctgtgaggatgtggaagctgcactgcagtttgtagatgacctcctctcacaggatattcacaacctgcgtttctggggagtggaaggcgttgactataatgtggatgacaacggtgaattttaccgcacagaagagcagagaaccagagcggttgacactgcatacaaagcatcccatacctgtacctattcttattttccgcagtattccggtacaagtgatgacggaatcaatgcgaataagccggatggacaggcgaatgaattttttgacggattaaatgatgatgtaaaagaagcattttctgcttatggcgcagagacctatgtggatatgatcggaacaaatgaagctccgggtgcatggtatccgatgtggtcctattcaaacagcttcactaccgatacggaaggcggtatggcatggaataagatcggtgagatcaagcacgagtatctcccacaggtcgtgatggcaaaagattttgacgcggcatgggcagagtacatggatgcatacaacagctgcgatccgggtgcgtttatcggtgagttacagacagaacttgataagagaatggaagaagcagcgaaatacgaataacacataaaatgaaattggaaacaggcagatgcaaggaagatttcatctgcctgtttttttaaggagtggggtatggctttgacgagaacaagatccaaagaaaaagaaaatcaatataaagcaaagatcacctggaaagaaataaagagacagaaagttctgctgttctggagtggtgtgatggtaatctatggcatcattttctattaccttccactggcgggatgggcgatggcgttccagaattataagccaaagcttggaattttccactctgagtttgtgggactgcagaagtttcagaccttattttcggatatgacatttatccgtgtcatccggaatacgcttgcgatgggtgtgataaacctggttgtgacatttgtgacagcaatcgcatttgccattcttttgaatgagataaaatcacatggcgggaaaaaggttgttcagaccatctcttatctgccacatttcctgtcctggattatcgtaacgggaattctgcatgatatgctctcgggaagcggaatcatcaatgagatattgatgaatctgcatgtgattacacagccaatcaatttttttgcacatccgaattatttctggccgatcgtcgcgtttgccaatgtgtggaaagagacaggatggaatgccattatttacctggcagccatcacatccattgatccgtccctgtatgaagcggcttccattgacggtgcgggaagatgggcaaaaatcaaatacgtgacacttccgggaatcaaaccaacgattatgattcttctgttaatgaatgtaggaaatgtattaaatgccggatttgagattcagtaccttctgggaaacggactggtgcagaaagtgtctcagacgattgatatctatgtacttaaatggggtatcagtcagggagattattccattggtacggctgcaggtatctttaagagtgcggtaagtatcattctgattgtcattgcaaaccagattgcaaagcgcaacggagaagaaaggttattctaaggagggtaatagcatgcaacagctggcaggagcaaataaaaaaagaaagagaacaggatccgttgatgcatttcccattgtgaacggaatcattatgcttgtgattgttgtaatcacattatatccggtgctgaatacgctggcgatttcattaaacgatggcacggatgcattgcgtggcggaatttatctgtggccgagaaaatttacatggaaaaattatatcacggtattgcagaaagataatctgattaccggtgcatatgtcacggttgcgcgaacagttatcggaacagtgctggcactggctgcaaacgcgattctggcgtttgttgtcagcagaaaaagatttctgtttaagagaagcctttccctgttctgggtcattacaatgtatgtgaatggaggaatgattccgacattcctgctttacaaaggactcggtcttaccaatagtttctgggtgtatgtaattccgggcatggtaagtgcgtttaatatgctggtaatccgcacttacatgaatggtataccggacagtctggaagaatccgcacagttagacggtgccggatatacgacaatttttctaaagatttactgtccgctctgcaagccggtatttgcgacggtggcattgttcgttgcagtcggacaatggaattcctggtttgatgccatgctgtacaaccgcatgaattctgatctgacgacgctgcagtatgagctgatgaagctgctgtcatccgtcacgaatcagggaacttcggcagaagccatgaagaatgcagtgggaaccgttacaccgacgtcagtccgctctgcggcaacgatactcacgatgctgccgattatctgcatctatccgtttttacagaaatattttgtcaccggtcttacactcggtggcgtaaaagaataattccatataaaagcgaaggagcgtatgcaatcccatcttgccggtgtcccttaaaaacagtataattgactggaaaagagggaaaacagatgaaaaagagactggcagaaggaatgaccttaatggtactgcttctggtgctgtggaacatggcggcacacacagaccgcatggcagaagcgcagataaagcattttacggctttttttccgacggagggaaacagccttgaatatggaaatatcatgaaagcgaagattgcagaggtgacaggagcagagtgtgaagaactctggctgtccggtcagaccaaggagcaggcgctcaattcatacattgccagcggcagatatccggacttcatacagggggaaaaaaacttatacgaagcagaggcattgattccgattgatgagtactgggaggaatatcccaatatccggcaatacatgacgaatgagcagtgggatatgctgcgccaggaagacggacacatttactggattccacaattcggggtgacaaatggaaaaagcagcgatgtgatccatgacggggaagcattctggattcagacgagggttttaaaatgggcaggatatccggaagttcatacggtagagcaatatttcgatctgctggaggcttatgtgaatgccaatcccatgatggagaacggaaccaggaatatcccatttacggttcttagcgatgactggagatatttctgcctggagaatgtgccgcagtttctggatggatatcccaatgacggctgctgcatggtcgatccgcagacctttcaggtgatggattacaacacgacagagacggcgcgggcttattttgaaaaattaaatgaagaatatcgtaagggaatactggatgcggaggcgttcacaaacagctatgaagagtatctgaataagctgtccaccggagcggtccttggaatggtggatcagtggtggcagttttactatgcgatttatccggcatatgacagacagaaattgagtgagcagggatgcgattatgtaccgcttccgattacgatgcaggagggggtggagaaccagtggcatgtcgagagagcggcatctatcgatacgtcctccggcctgtcggttacggtctcgtgtgaagacatagacggtgccttgcagtttgtgaatgatcttttaaagccggaggtggagattctgcgtttctgggggcaggaaggaacggactattgcgtggatgaggaaggggttttctatctgacgaaggaacagtcaaagcgtttttcggatgatctgctggcatcggactatttctgctattactcgtatttcccacgttgggagggaatgcttccggatgggaaaaatgctttttcactggaataccagccggcagaatttttaaaaagccagctgggggacatccagaaatgtctcagggcgtatggctgtgaaagctatgtggatatgattgggaatcataaggcaccgggaaactggtatccgatgtattcttacgctacatcgctttctgataccacagaagcaggaatggtatatgagcagatcaatgagatcaagcacgagtggcttccgcgggttattatggcagaggattttgatacagcctggcaggaatacatggatgcatacaatgcctgcagtccacagattttgatggaggatctgcagcaggaagtgatgcgccgcatctgccggtagaacctttcattctatacgatattctcacagaagatcttatagaatgggaggtttttttatggggacagaacttaaccaggcgctggtgcagcaggcactttcgtttgcgccggagataacggaagaacggcaggcggtgaaggtgtgggaagatgggacggtagaattctatctgtatgcaccgacggctgagacggtggaagtggcgggtgtgggcggttattttgatgcagcgccgcttgcactcctgccggatggaaacggagggttttacaggaagatagagaacttcccgcgaggaatgcactattatcactggtttgtggacggagtgaaactgtttcatccgaaagccggtttttcttatggctgctttgagacaatcaacacatttgaggtgccggagcgcggagcagaattttactatctgaaagaggtaccgcatggaacggtgcatctggcaaagtacgcatccggtgtaaacggtcacctgaaagaatgttatgtatacacgccttatggaagccagaaagatcccagccggcggtatccggtcttatatttacagcatggtgtcggtgaaaatgagacgggatggatctggcaggggaagctgaattacatcatggacaatctgatcgcggagcataaatgcagggaaatgatcgtggtgatgagctgtgattatgcgtttatcgagggtgaggaggcagttttctttcccggggattttgacagagagctgatggaggatctgattccttatgtggaaacacattttccggtaaaacggggcagaaattaccgggcactggcaggtctttcactggggtctgcactggcggcaagaagtgtatgcaggcaccgggataaattttcggcacttggaatgttttccggggtatcgctttatgacgcagagaggatctgcacggatgaggcagaaaaaccggatgttgtgtttttctcctgcgggagcagggaagaggagatttcgcgcggaatagaggatatctgtaaaaaaatgcgcgaatcagaaacgctttgcgtaaagaaagtatatgaaggctatcatgaatggcatgtctggagaaagagtctgagagattttgtgccgcttctgttttgtggcgcagagactgtggaagaaacagcatctgcatgctgcatggagcgccgcctggatgaaaaacagctgtccgtccagagcatggaggagcagatgctcttttttgatccggtacaccggcagatccggtttgaaacggatgcgcaggggagaccggcagggaaatatccaaagaccataccgggcgtaaaagtgtgcagtgacggcacggcagaattctatctggaggcacccggtgcggctcgtgtggatgtccggcttaaggagaagcatgagattttggctgcgttaacggagcagcagccaggaatatggcgaggaaaaataggaggactttctgccggctatcatgaggtacattttatcgtcaacggcgtggagacgattcatccggaagttccggcagggtatgccggatataacggacagggcagttttgcatgcaattattttgagattccggaaccggagttctgttatccgcagctggcgaatgtgccgcatggcatgcttcatatggaatggtaccgggaggaagaaaatggcggataccgcctgtgttatgtgtatacaccggcaggatatgagaagcatgcaaaacagaggtatcctgttcttattgtggagagctttcggtgggagagcgaatgtgtgtggattcatcagggaaaaatcgccaacatggctgaccggcttatcgcagagggaaaaatgacggaaatgattcttgtgatgcagaagtgcagcaagcggaaagaagcgaggattccggaggagatcattcaaaaataccgtgtgataccgggagaagagcatcgggcgatgataaaggcacaggatggatctgactggacatcccgcagacatcagctggcagagcagctgaagaactctttccggtaaggagaaggattgaaaatatggaagagattatattttggatggaagaggcggcagattccggggtaaagaagatagcggataaagttgccggcgatgtggagctggtaacggacagacgcccgcgggtgctgtacggcacatcacaggaagaacttgcggatgtggcagaacgggcagagactgtgattgttccggctacggttggaaaaagcagacttctggagcagatggaggaagaaaagagaatcggtctggaacagatccggggaaaacgggagtgttatggctggtttttcctgaatgatccagaatggcacggaacacagattcttctgattgcagggagcgataagcgtggaacgatctacggactgtttcatctgtcagaacttctgggcgtatctccgtttgtcgactggtgtggtatcaggccgcctcaccgtgagcatgtgggacttcgtgcatcgatggcgtgtgtggcgggagagccgtctgtaagataccgcggtttttttatcaatgatgaatggccggcatttggaacatggtgcaaccggcgctttgggggatttgggacttcggtttatgagcatgtgtttgaactgctgctaaggctcaaagggaactatctgtggccggcgatgtggagcgctagatttggggatgacggcccgggacttgcaaacgcaaagctggcagacgaatacggaatcattatgggaatgtcgcatcatgagccgtgtctgagacagggggaggagtataagtacctgcgcggaaaagattcggtatatggcgatgcatggaatttccggacgaaccgggaaggcatcatccggttctggaaagacggactgcttcggagaggaaaatttgaaaatgtgattaccctgggcatgcgtggagaggcggatacggcaattctcggagaaaaagcaacattggaagacaatattgaactgctgcgcgatgtgctaaaaacgcagaatgagctgatccgggagtgtgtggatgaggacgtaaagcgtgtcccgagaatgcttgctctctacaaggaagtggaagcatttttttatggaaatgatcagacggcggggctgatgggatcggaagaactggaagatgttattttactgctgtgtgatgacaactatggaaacctcaggacactgccgacaaaggagatgaggacgcataagggcggatatgggatgtactatcatctggactatcacggctggcccatttcctatgaatggatcaacagttcgtaccttccgaaaatctgggaacagatgacaacggcatatgaattcggggtgcgggaactttggattgtcaatgtgggggatattgcaacgcaggagttcccactgtcgtattttctggatatggcatatgattttggacgttggggaagtggtgccgtcaatcagaccgcagagtataccagacagtggacgaggcagcagtttggaagctttacggaggaaatacaggaacagattgcggacgttctgcagggatataccagattgatacaaaagagaagacctgaggcaatgcgtgcaatggtgtatcacccggtgcatggaagagaaacgcaggatacactggaggagattaaacggatacttacggaagcggagcgtgtgtatgcgtgggtgaaggaacatgcgccggaatacgaagcggcgtttgtggcgctcatctattaccctgcggcaggaacactgaatctgaccaggatgcatcttctggcagggatgaatcaatacctggcaaagcttggagcacttcacgcgaatgattacggggatgcggtagaacagtgtctgaagcgtgaccgggaactggtgacggcatatcatcagatggatcacgggcgctggaatggcatgggagcatcggagcatatcggatttgtgcactggaatgaggatgaatgtttaaaccctgtgattcaccgggtactgcccgcggataaaccgagactggttgtgacagtggatcagacgatgcagcatgcagagggaagcccatggcttacggaatccatgaaactgccggattttttagaccctgcgtgcaggagcgccgggatcaccctgtatgggctgagtgaatgtgaggctgcatacgaggtcacagaaaaaccggaatggctttcggtgtggccgatgcagggcgtgctggacgggaaaaagcacaattatgaaaagctggaacttgtaataaaccgggagcgttgggcaatgaaccgggatggaaatacaggtacgtctgcttgtggagtgcttgaaataaaaacgccttccggctgctgccggatcgatataccggtatgtgaaaatctgccggaagtacaggaaggtacctttgtggatacggcaggttatattgtgatggaggcagagcattatgcagaccggaaggatggatatgcagcggatggtaagcgggaaggaaaaaacgaaaaggtacggtttcaatgcatcagggactatggaaaaacgcggtctgccatgaaagcatttccggtcacagcgtatggtgtgccgggagaaaatgcaccgtatctggagtatcatttctgggtatcaaagcccggcgggtatgtacttacgctttatatgcagccctccaatccggtggcgaacgatcagaaactctgctacggtgtgcagaataacggtggtgagatccggatttataacgcggtacctgagggataccggatcggagatcagggagagttctgggcaaaaggtgtattagaccagatacgcagacaggagattccggtttcatgcagaagtggtatcaaccgtctgcgcatttattccgtcacacctgggtttgttctggaaaagctgttgatccgcccggaaggaacggatgtcccggaaagttatctgggacccaaagagacgtatcacacataaaggaaagaggagaaaaggagtagaacgatggcgggagcatttgagacgggaaagtatcgcaatgtgtttgcagagtacgggtatccggaagcggagattcagagaagagtggagcagacatttgagacaattttttatgggaatgaggaggagcgtttctatcatgaggtgggagccgacatggcatacatagaggatacgggaaaccatgatgtgcgcacagagggaatgtcctatggaatgatggcatgtgtgcagatgaaccgcagggaagagtttgaccggctgtggaaatggacccggacatatatgtacatcgaggatggaccatgtaagaattattttgcgtggtcctgtgcaacagatggcagtaaaaatgcggaaggtccggctcccgacggagaagaatattttgccatggcactgttttttgcggcagaccgctggggaaatggaaccggaatattccactatgcagatgaggcgcgggcaattctgcgggaatgcatccacaagggagagccggggcatccgggggaaccgatgtgggacacatccaggcatctgatcaagtttattacaaattgtaatttcagcgatccgtcttaccatctgccgcatttttatgaattatttgccagatgggcggacgaagatgaccgggagttctggagaggcgcggcagaagcgagcagagcgtatctgcatctggcatgtcatccggacaccggtttgtcggcggagtatgcggagtatgacgggactccgcatgagggagatcaggagattttcggcaggcatgactggtattacagtgatgcgtaccggacgattgcaaatattgccatggactggctgtggtttgggagagatccctggcagcaggagatcgcgggaaaattacagagtttttactgcgaaaagcagagcggacactgggatggtgtgtttctgacggacggcacgcttcttagagagcgggcgctgcacccggttgcggtgatagcggtaaatgcagaggcttcgctggctgcgaagggagaaaatgcaaaggaatgcatcagaaggttctgggagacaccgcttcggacaggggaacgccgttattacgacaatttcctgtatctgtttgccatgctggcactgtccgggaattatcgtatttactgaataaagttaggtcatgaatctgatattttaatgtcgtatctggtattctgattttcaaaggaaggttatatttaatgcagaaaaccttagaaaatcaaaacaggagaaagcatatatgaaatatggatattttgacgagacgaagaaagagtatgtaattacaagaccggatacaccggcaccgtgggttaattatctcggttccccggaatatggcgcgattatttcaaacaatgcaggcggatacagttttgcaaaatccggagctaacggaagaattttaagatacatctttaaccagtttgacgaacccggaagatatatttatatcagggataataaaagcaaagactactggtcggcttcctggcagccggtgggaaaggatctgaaaacttaccggagtgaatgccgccatggaactgcttatacaaaaatgcaggcggattacagcggtattcactcagaagtgagatattatgtgccgctagaccgggcgtatgaggtgtggaatgtatgcattgccaacacatctgcagaagaaagagaactgacggttaccgggtacgctgaatttacaaacaacagcaactatgagcaggatcaggtgaatttacagtattcgcagtttattacgcgcacggttttctgtggggatcatgtgcggcagatgattcatgcgaatctggatcagatcgaggaaggcagcgatgtcgatgataaaatcgttgtcagccgtttctttgcactgaagggagcgaaagtgacatcctggtgcggcgacagagagaagttcctcggaagatatcatggatatggcaatccggcaggtgtggcagagggaacattgtgtaacgagggaaatgagaacggcaacagctgcggagcactcagcacggtggtgcggcttgcaccgggagagcactgtgagttcgcatttctggttggaatgaaagaggaacctgaggtggcagagattttggcctcctatgcgctgccggagcaggtctgtggaaaggaattgcagcagctgaccgattactggcatggaaagcttgcacattttcagataaagacaccgagtgaagaattcaatgccatgataaatacatggaacgcctataactgctttatgacatttatctggtcgcgtgcagcgtcgtttgtctactgtggactgcgcaatggatacggttatcgtgatacggtacaggatatacagggagtcattcaccttgcaccggagatggcagttgaaaaaatcaggtttatgctttccgcacaggtggataacggaggcggactgccactggtaaagtttacacacaatccgggacatgaagatacgccggatgatgcatcttatgtaaaggagaccgggcatccggcatatcgtgcagacgatgcgctctggctgtttccaaccgtctacaagtatatagcggagaccggacatctggaatttatggatgaagtgattccgtatgcaaaccggggagaggcaactgtttacgagcatctgaagcgtgccatcgatttttccatgaaccatctgggaaaacacggtatgccggcgggtctgtatgccgactggaatgactgcttaagactgggcaaagaaggggaatccacatttgttgccatgcagctttattatgcgatgaatatattgcgaaagtttgcagaatacaagcaggataaagaaacggcttcctatcttgatgaaaagcaggaggaactggggaaattgctgcaggaactctgctggaatgaggatcgctttatccgtggatttacagaagcaggcgaagtgatcggaaagcgcacagatccggaggcaaatatgtggctgaatccgcagagctgggcggtgatcagcgggctggcaaaagcggatcaggcggatatggcgcttgagagggtatatgagaaattaaacacgccgtatggtgcaatattgatggacccgccgtatcatgcgcacgcctttgacggagcactggctgtcatctataatccgggtgcaaaagaaaatgcaggtattttttcacagtcgcagggatggattatcctggcggaggcattgcggggacatggagacagagcatttacttattttatggaaaatgcaccggctgcacagaatgaccgtgcacagatccgcgtgattgaaccttattgctatggacagttcacggagggaaaggcaagtccgaatttcggaaggtcacatgtgcactggctcacgggaactgcttccacggttatggtcggctgtgtggagggaattctgggtatgcgcccggatttctatggactgcatcttacgcctgcaattccgcatgaatgggaggagtttgaagtaaataaagttttcagaggctgccagttacatattgttgtgaaaaatccgggacatgtgcagtcgggatgcgacagactacttgtaaatggagtcaggatgcagggagattatattccgcaggaagtattgaaaaagcagacagaaatcgtattgtatatgtcataagatgggaggaaagattcgtgggaaagatagaatttttggatcagcagggaagcttccgggtgtatcagccggaagactacagtggattgtattttcctcttgcaggagacggtgggttaaaatcctgcattacaccgacactgggcggcgacagcaaaagggatcagaaccatttcctgatggagccggtcagtattgaaaatctccataacaataaaaatacaagaaatttctggtgccgtatcaaaaaccggggatactggtcagcctgcggttcgtcggcagaggcagaatttctgcggtttaccggagaacaggagaaaagcgtactggaagccggatttatgtggcagaaactgacgcggacatccgcagtccatggactaaaagcagagattacttcttttgtgacggtagacggagcgatggaagtgatgatgacggaacttaccaatataacagaggaaccgcttgaaatgacaccgattgcagtgatgccggtctatggaagaagtgcggacaatatcagggatcaccgccatgtgacttccctgttgcaccggatctgtaccacggattatggggtggaggtgacgcctgcgatgtcgtttgatgagcgggggcatcagaagaatcatacaacgtattttgtatatggttccaccggagagggagaggcaccggcagctttttacccgaccgtcggggagtttatcggggagggaggttcctatctcataccggaggcagtccggacagaaaagccgggagctgtggcaggaagtaaggcagagggaaaagaagcagtgggagctcttaagtttgcggagattttattaaaaccacatgagacagtctgctatctgactttgggcggaatgaccgacgagagatcacagatcgaacctcttacagcatctctcagacaaagaagccaggtaaaggaagcttatgatgaagtaaaacggtactggacaaagaaagtaaacatcacatttaaaacgggtaatccggatgcagacaattatcttaagtggattacgttccagccaattctgcggagaatttacggctgttcgttcctgccgtatcatgattacggaaaaggaggacgtggctggcgggatctgtggcaggattgtctggcattgcttctcatggacccttccgcagtccggcagatgatcatcgacaattacggcggtgtccgggtggacggaaccaatgccacaattatcggaaatgcgcagggggagtttattgcggaccggaatcatattacccgtgtgtggatggatcatgcgttctggccgtttgtgacgacaaaattttatattgaccagacaggagatctcgagattctttttgagaaggttccgtattttaaggatctgcagtccaaaagaggcacagatcacgataccggatgggacgagacatatggaaaatgccagcgcacagagggtggcgtcgtctatttcggaagtgtactggaacatctgcttcttcagaatctctgtgcattctacgatgtcggtgcgcacaatgagatgcggctgcacggggcagactggaatgacgcgctggatatggcatgggaaaatggagaaagcgtggcatttacaagtgcttatgcgggaaatttaaaagagattgcgcactgtatccggctgttagagcaggagaccggctgtaagcgttttgagattgcagaagagatgggaatgctgtttgcaggtggcagggagctgtatgagaatgtggaaaagaaacgagggatactggacgcctatctggagaaatgtgcacataatctcagtggtcagaccatgatcgtaaaagcagagcagatttgcagcaatctggaggaaaaagcagactggctgatggagcatataagggtgcaggagtggattgctgaggatgaggcacacggatggtttaatggctattatgacgatcataagaatccggtggagggctgtaaagacagaaaggtacggatgatgctgacgagtcaggtttttgcgattatgagcggcacggcaacaccggatcagatccgcaaaatctgccagagtgccgataaatatctgtatgatgagaaagcgggcggctaccgtctgaatacggattttggtgaagaaaaaatggatctgggaagaatgtttggatttgcttacggggagaaggaaaacggagcagtattttcccatatggctgtcatgtacgccaatgcactgtaccggagaggatttgcgcaggagggaaataaagccctgcaggctcttcttaacgcggcaatgaattttgacaacagcaggatgtatccgggactgccggaatattatgatctgtcaggaagaggcatgtatgcatacctgacgggtgcggcaagctggtatctccttacgatggttacggaagtattcggcgtaaagggggtcatgggagatctggtaattgcgccggcattcatgccggaacagtttgatgcgcagggaaatgcagaagtaaagctgatttttgcgggaaagaaattcgacatccggttctcaaatccggaaaagtgtgagtgtaaaaaagagtggataaaaagtgtcctctgcgatgaaaagcaactggaaccacaagcgggggcagcatatgccgtgcggatcaaaaaggagtggatcaaacagctggatgcagaaaaagagcatgtcataaaaatcctgtttggaagataggaagcagatagtggtcttcacgggaggcatacacggttcttcgggggtaaacaatattgcacgaagcacagcatgccagattcctggagaaaagcagctggagcattcgtcggaaaaaaatgcgcgtatttcttccagccagagctttgcagctgattccgtgtctcttccacgtttggacacactggcgggcgcatgtccgacacaccggagacaatgggtggactttctggcagcactaaagctgacgttagataacgatacttttgaaaacactggaaaatcaaggtttttcgagcgacggacaagcagggtattgtactaaaaactgaatacgacgcagaagcggcgtttcttactctctacatgggagaacaggaacgccgcttttttcatgccctttgttacgcagtaggggcagaaaaagccttgctacaagcggttttccgggcgcgtatctggcgcggaaagggatttataccttatcccccgaaaccgcgcttctactgcgtaacaaatccaaagcaaaggagctatgaactatggcagttttcagagtggaacgaaacaagggctataccgtaatgagcaaccaccacctacgcaacaaggagctttccctaaaggcaaaggggctgttgtcgcaaatgctgtcactccccgaagattgggactacaccttgaaaggcttatcccttatcaaccgggagaagatagacgctatccgcgaagccattaaggaacttgaacgcgccgggtatatcgtccgttcaagggagcgcgacgagaaaggacgcttgcggggcgcggactatgtgatattcgagcagccgcagccgcctacgccggatttacctacattggaaaatccaacattggataatccaatgcaggaaaaaccaacattggaaaaacctacgttggaaaatccaacgcaattaaataaagatatacaaagaactgacttaccaaaaaaagaaaaatcaaatacagatttatcaagtacccattccattcctatcctttcccctaacccctctccttgcagagaagcggctgcgccgccggaacggaaaggaacggaagcggcagcacagagcgcagttgatatataccgggaaatcatcaaggacaatatcgactaccacattctcaaacaggacatgaagtttgacagtgacaggctggacgagattgtagacctcatgcttgaaaccgtatgcaccgccagaaagcgggtacggattgcgggggacgactacccggcagagcttgtgaagtcaaagtttatgaaactagacggcgagcatatccgctttgtgcttgactgtatgcgggagaacacaaccaaaatccgcaacatcaagcaatatctgaaagccgcccttttcaacgccccgtccacaatcggcaactactacacttcccttgtcgcccatgacatggcaagcggcgcactgtcaccgaaaaagccgcagtacggcgacccggactattattcatgcaatgagggcgaaagcctgtaaccacccacaaccacaaaaggaggattttattatggcacagaaaatgacaggagcattggtatttgacgagcgcaccgaccgttacgacatccgctttgacttaaacagctactacgggggcttgcattgcggcgagtgctttgacgtattcgtgcggggcaagtggaagccgacccggattgagtacggcgacaactggtatcttgtgggtatcagagccgaggacttgaacgggctgcgggtgcgtatctgaccgccgccccataaagaaacgcgaaaggaggacgcgacaaattgcaggacgaagtaaacgaaaagaccatagccctttacatcaagaccgggaagctgaccgcgcagacgctccaaaaggcaatgaaagccatactgtcaaagggcaaaaagcagcttgcaaaaccgccacagggcaagcagagcttaaagcagcttatgaagcagaacgcgggcgtttccaacattgagattaccgagggcaatatcaaagcctttgagagtacggcgaaaaagtacggtatcgactttgcgctgaaaaaggacgcgacggaaagcccgccccgctatctggttttcttcaaggggcgggacgcggacgtactgaccgcagcctttaaggaattttccgcaaaaaagctgacacaggagaaaaagccctcaatccgaaagctgctctctaccctcaaagaagctgcacagggcagaaacgcggaacgggcaaaggtcaagaacaaggacagggaggtatcgctatgaagccggaaatcaagaagctgcttatcctaaatctcccgtatctgctctttgtctggctctttgataaagtgggcgcggctgtccggctctcccccggcgcggacgcaagcgcaaagctgctacatcttggggacggttttaccgccgccttttccagtatcgcgccgagcttccacccggcagacttagctttaggcattgcgggggcggtcattgtccggctgattatctacaccaaaggcaagaacgcgaagaaataccgccgcgggacagaatacggttcggcgcgttggggcggggctgacgacataaagccgtacaccgacccggtatttgagaacaatatccccttaacgcagacggaacggctcaccatgaacagccgcccgaagcagccgaaatacgcaagaaacaaaaatatccttgtaatcggcggttccggcagcggcaagacccggttctttgtgaaaccgtcgctcatgcaatgtacgtcaaaggattttccaacgtcgtatatcgtcactgacccgaaaggaacactgattttggaaaccgggaaaatgttacagcggtacaaataccgtatcaaagtgctaaatacgattaacttcaaaaaatccatgaaatacaatccctttgcctatctgcggagcgaaaaggacattttgaagttagtcaataccattatcgccaacaccaaaggcgacggggaaaaatccggcgaggatttctgggtgaaagcggaaaagctctactacaccgcgctaatcggctacatctggtatgaagccccggaggacgagaagaacttcacgacgctgcttgagatgataaatgcgtcggaagcccgcgaggacgacgaggatttccagaacccggttgacctcatgtttgaacgtctggaagaaaaagacccggaacattttgcagtcaagcagtacaaaaaatacaaacttgcggcgggcaagaccgcaaaaagcatacttatctcatgcggcgcgaggttagccccattcgacattaaggagctgcgggagcttatggaaaccgacgaaatggagcttgacaccataggcgacagaaagaccgcccttttcgtcatcatcagcgacaccgacgacacttttaactttgtcgtttcaatcctttacacacagctattcaacttgctttgtgacaaggcagatgatgaatacggcgggcggcttcccgtccatgttaggtgcttacttgatgaatttgcgaatatcgggcagataccaaagtttgaaaagctcattgcaacgatacggagccgggaaatatccgcgtcaatcatcttgcagagccagtcacagctaaaagccatttacaaagacaacgccgataccatagtcggcaactgcgacaccacgcttttcttgggcggcaaggagaaaaccacccttaaagaaatatcggaaattttaggaaaagaaacgatagacagctttaacacgtccgaaacaagggggcgggagctttcgcatgggctgaactatcagaaattgggaaagcagcttatgacggaagatgaaattgcagtcatggacggagggaaatgtatcttgcagctacgcggggtgcgcccgttcttttcggacaaattcgacataacgaagcacccgaaatacaagtacctgtccgacgcagacccgaagaacgcctttgacatggaaaagcaccttaaacgccgccccgccattgtcaagcccgacgaggtttttgactattacgagcttgacgcggcagacttacaggaggacgcagaccatgaggaaacgtagcgcagaggaaaaacaaaagcagcttgaacggtttttaatgaatgttgcggaagccgccgacgctgcattatgggagtattggcgggaaaaggaagcggaacaccgccgttttgcaacggagtatgtcacgcgccgggggcttatcccgcaacagtgacagcatggcagaccgccgggggacaggggaagctacacttcccctacgctgccttgcggcagctacccctttgtgaacttgcgggaagcgaacaccttgctacgcaagctattcacttcccgcaagtctgaaaaaaacgtccggcagcacagcggaacacagaaaggagcgattgaagcaatcacatctatccataccggctacatgatacgcgcccccactttccggcgcagtacacagcggcaggagccgcaccccttacaactgaataccgccgcgccgcagaacttacgcagcgcggggacagccgcctttaccagagggcggtttttttgtgcggcggcgaccatacgctgaccgccttttgtccgcttgccggacagccgcagacgcggcagaaaggatatatttatggcatttttcaatagcgcagtagacgttttgcagacccttgttgtagcacttggagccgggcttggtatctggggcgtaatcaatctgatggagggctacggcaatgacaatccgggcgcaaagagccagggcatgaagcagttcatggctaattaaagggaacaaaaaagaaaggaaaaccaatccagacggtatcagcggcaggatacaagaataaattgtgatttcacaagattggtgctataataagagaaaagttcctgccggggcagccgccccggtggtatggatagaaaggcaggaaaacaatatgcacatcagctataaaccactctggcacacactgttagagcgtgatatgaggaaagaggatttaaggcttgccgctggtatgacaacgaatatgattgccaacatgagcaaagagggaaagcacatcagcatggacacattagcccgtatctgtgaaacgctgaattgtgagattaccgatgtgattgagttagtaccagacgagcctgcttccacaggaggtaaggaacatgagagaattgaaaccaagaataacggaaaacggaattgattatatccttgtcggagattactacatcccggacttgaaactgccggaggaacaccgccctatcggaaagtacggacggatgcaccgggaatatttaagggaagtccacccagccagattgaatacattgatactgaccggagaattgtggacatatcttgcagacctgaacgaacaggcacaggaacggttagacactatcatggagcagatgaaagccaccgagggcgtgacagaggaattgaagcgaactcaacaaatggaatgggtgcagcgttgtaataacattcacaaccgggcagaagaaattgttttgcatgatataatttattcatacgggagtaattaaatcggaggtatataagatgattgaaattgtatttggtgaaagtgcctgtggaagtttgaaaattgcccaaacttacggtaagggaaagtatagaggaagtgcagtttcggtctttatgaggcacgaagatgggagtgttccatcttcagatgaaatgaaagaagcacaaattcaagcacaggaacaagaacatattgcttgggagaatgctattccattgggaggcaagagcagtgatgtttattgttttgatatggctcttagtgtgggagatatttctgataatggaattggcgaacagcggaaaaatgttctcaagaaaatgctgtctgtctggtttgtagaggatttagactatcaggttgaagaaaaaatacagaaaattaaaactacattgtcttcggttattgaacgatatgtagctggggaagaagttcgtatttggtatagctataatccggatgaactttgcggtatgtactggcttatgaaacaacttcgaccattaaactgtcagacaacaatttatttggttaagttacctgcctgggaatatggaaaagaaaatactatgacatccaaaatagcatggggtgaggtttctcctggcgaatggggaaaatatataactctacaagaaaaagctaagcctgtatttctttcagcttgtgctatgaaatggaatcaacttcaaaatgaaaatgcacctttgcgtgcaatactaaatggtaaattgcaaagtgtttcagaagatatatatgatagtttcattcttcgtgaaattgcggaacagccagagcaattcaaaatggctattgttataggtaatgttttaggaaaatatcaacttggaattagtgatgtatggatttctaatcgcattgataaaatgcttgaagatggtgtgttggaaattatacaggacgcaccaaagggagaaacaaattatcgccggatattaagaaaacgaatgaaataataaccacagcaaaaaccgctgctacatggaagctaacaaaccatgcaacagcggtttttctttatcgttttttcctctggctgataggcgttcccattttctttgattttttgagaatccgaatcagccagcgaaattcttcgtctgacagatttttatagttgataccaagctgcttgcagtaaaggacaaccagcttttcatcccggctgcccttgaaattttcgactgcttcgagattttctttcaattcatcggcaacggtggtctggggcgcactctcactgtcctttttgtgggcttcccgaatatcccggataatcaggttgaggtcatccagaaccatgtgactgaaatactcatcatcactgatataggcggcttgcagcactttcaaatgcgggtcatcttcgcctgggcgataccgttcaatgatttcatgccggacggtatcgacaagtgcattgaggttttgaatctgcatggtagcaatcccgtccacataaatctcaatgtctgcaagaaacttgatgaaatctttatgtgtagcaagctcacagagcagacggttgttaatccgaccgcttttcagcagtgccaccatctcatcattcaaatgcagctccgtcaatggtgtgttgatctgctccctgttctctgtccggcacagtagataatcaacagagaccccatagaagtctgccagcgtgataaggttgccatgattgatttccttaaaatcctctttttcataacttccaagagctgatttggaaatgcctgtcagctttgatagttcttccagatttaagcctttgtccttgcggagttcccaaaggcgttcctgtatgcttgttgctcctttcatgggcgcgcgctcctttccaatggtttcattgctgccgcttatctggattatatcacactttccgcaatcgtggaaatttctgatttttacccctaattcctactttgtggacatacggcacagggcacaaaaatgttctatgatacaggtagttcatcgatggattattccaatcgaatgaccagcctgtgtgggatatgcttccccggcgatgtagtgccatgacttttggcagggatgtggaggaaccctgaccgaaacgagcgtaccaaagggagcgatacgccgctgtgagattcaggggaggaacgacaccggggagaactggcgaactgacaccgaaatgataccgaaacacgacaatctgatagggggatagtctaccctatcgctgatannnnnnnnnnatcggctctatggctgtaattttgccgaaaatcgccccgaaaccatacactaaaacgggaggaaacacaatatgccgagaatgagtaaaaagaggaagcatgagctttccttttacctcaatgaccgggggcgtgtcacttacaacgaattatgccggaaatgccagcatgggtgcaagcagagcttccgggcggttgtgattgactgcccccgttatttatccaaacgagcaaagaaaaaggaggaacacaccgaatgaattttgaatttatgacgatagacacaccattgccgccctgtatgccctttcccagagcgttgacaggatttccagtcagcagcaccgcaaaggtcatgtactgccggatgctggacgctatgctctccaaagggcaggaggacgaaaacggaatcctgtttgtctgcttccctgtcacagcccttgccgcagtcttgtcccgcagctctatgacggtcaagcgttctctgaatgaactggaaaccgccggacttatcatgcgggtgcgtcagggcgttggagaaccaaacaggatttatgtgctgataccgggaaaggaggacgctgcccttgcctgatacctcaaagctggaaaagataaaccgggagctggagaaaagcgaaaagaaactgcggaaagccatcaatgatgaaaaggcattgcagcaccagttaaagcagcttacccgaaaggaacggacgcaccggctctgtactcgtggcggtatgctggaaagttttctgcaagagccggaacgcctgacagatgatgatgtcatgctgttgttgaaactcatttttcacaggcaggacacgcaggaactattgaaaaaactgttggaacgggagaagctggaaaccccttagtttactaagggcgcaattatacaccacccagaggttggtgcattgcgttctccgaaggctcctagccggagggctgtgattttccgcagtcatggtctgctccaaatcatacaggggacgctacgcttcccctgcgctggctgccgccagctacccttttgtggacttgccatctggggacaccttgcgttgcaagctgttcccagccgacaagtttcataaaatatgctatcttttcgataggcaatgaagtataatgaagtcagcaataaatcaggaatttgaggtcaaggcttaaacgggaggtttatatgaaaaaataccaatgtccttgctgcggatattttacctataatgttccggcaaatgaagattgtgggtatatctgtcccgtttgtttttgggagaatgacccgttcattgcttctgataacgaaccaagcgactctaatcatggaataacactaaaagaagcgaaatccaatttctcaaaatttggtgcttgtgaaaaagaaatgttatgttatgtccgaccaccgagagatgatgaaaagaaaatttcatagcaacaatgtcgaagttatggagggaataaaagtgaaggacactgctaagagagcaatagttacagttattgtgtttgttataatttatgttttatctggtccaattatcggatatacaaactacgatatgtatttgaaaggaattgaatttttatcagcggtaatcggagcaggatgttactggataggaagcaataaaaaatagttcttgaatttgacaaaggagttggaagtatgaaaagaataggtacagcattgactatcgtgttcatcatcgctggatttgcaatttccttttttattggacactatgtgagcgacaagtcacatacagaaagtcgagcagcacaatttgataaatatatttctcgtgcgattgatacaatcaaagataaaggtctgtccattgatggcgccccagaagcgatagccagcaatatttgggtggcacacgaattttgtgatagccctgaaatttccgcagaactcagcaatctgtggaataccattgtatatgaaaaagatgtgcttctcggtcaagaagatgtgttgactgctcaactgaaagatattttggaaaaatgtcaatagtctttgcaaattttctatttatcattcactcatcgggtcaacttgtcccgaacttttacaactaaatacccgccgcccacacagcggcacatcgagcaggaaatctgaaaaaaggtctcctgctttttttctgcccaaaatgaggtggtaaaacgccaccccatccaccaattagcgaaaggaggaacacgaaatgccctgtccacacaacgaaatcacgattgtgcagcgcagccagcggcagtctgctgttgccgccgctgcttaccagagcggcgaaaagctgttctgtgaatacgaccagcaagtgaagcactacccggaaaagcgtggtatcgtccacaatgaaatcctgctcccggcaaatgccccacaggaatatgcagaccgcaataccttgtggaacgccgccgaagcggtggaaaaacaatggaactcccagcttgcaaggcggtgggtgcttaccatccccagagacatcttttctcaaggagccgatgcgcatcttcccgggaagctccgctcctttcgatttattttaaaatttcatctaagcatgcgttccagcctgcgtcgaatcttccattgtcacaatgctctggatgatctgatctctccggcaattcccgaagtgggcaccaatctggtctccatgttttttcgttcttcggattatattcttcctgtccgttcgttggtctggcaaggcaaagtgcaagcccgcctttctgcggaattgtaagcaacaaaggacatttagtacatcgttccggcatatctattactaatacggctttagccatctacaccaccacctttcacaatctcgattgcttcatccgtaagcatttcttccggctttccatgcaaccgtacaccagaattatattcttcgcttctttcttccaactgctccacaactgcatccacatcataggcagttggaatctgttgcacttccttacataagttatgtatcagcaaatcaaaattctctttatcatcatcaaaatgatgatttgcaagcaacgatattacatcatcctcgtcaaccagtctcatcgctcgtcccccaatctaatctctgaccgcatctgctacaatacttagggatatttccccttgtacttccatcaccatctacgacttcctgcgcataatgtccacatgttggacagcttaaaaccatcagtgacttatcaaatataagattctttgccctctgatgcttctccactgccgcccggcattcttccggtgtgccaatcgcatggtaagcatcccaagctgccgcatcctcgtatgtaagaatttttgcatttatcggatgcgggttgtctggctcttttaattgtcgttccagttcgtctattacgatttcaagacagagcgccccgccgaacatttccgcaagacgcgtttctaatgcacggtactgctgtacctcttccaatgccttgattgccatttccagatcttccattcctccttttccggctacctgttccaccgtatgcatccgatacttgattctttcgattgcttcattctccgtcatatctacacctccaacagctccgggttgtcaattttattgccgatcacctcaaaattctctgaatcaaaatcatccagttcctcataatcatcatagcccggctcactcgtacaccatccgttttcgtgccacacgacacgttctctcgtctcatcttctggaaactcaacgtcgatatgccctgaaagaatatcattctcccaaatcagcttgccattcttgtccttaagtccggtgcactggcaaatggtagatgcatctacaacacaatgacagaagaaatccaaactatcctttgcgtagaaataataactttcgttgcccttttccgtgcaaaatgggtatgacagatatccttccacccattttcagttatcaatccgcttgccgcgatataaatatctactctccattattttccctcactctctatacggttccggcagtggcatccacgcaatcacttcgtcatctatcgggttgttgtacacatcgtctggattataatgcttgttctcccaccaccccttcgggataatgtaacactcattttcttcgtcccattcgccctcgatatccacccaattccaacagctatcacgttccgacatctctccattctcatacattgcggtagtgataatatccgcttgtccgccactgcggtatttccttctggcaagtatcagcacctctgtttctggatccggaaatctctcacttaccggaatccactgtccaaactctggctttctcgctactgttctcatgcattcaatcatttccctgctcctttccgcaccgcagctgatacggcacttcccgaaattttttcaagttcttttagctttctggatatttcctctggcgttccaagtgcacgatacttctgcacatcttccagtgcccgtatcgccacctcgcatgactcaatttcttttttgcagttctccaaattactgtaatactcacccaggttcttttttttgccgcaaatacctttggcattattaacatcaactccgccaatacattttttgactgctccatagcgttttgaataaaaatttttgcttcattctccgtcatctttttacctccactaaagttcagtttaatttacaaatacctttatcttcatcaagagcaatcacattttttcgtgcaagcactcttaatgttgttgttcgacaattataaattggaaatttcattaaattgcttccgttatggtattcgtgaaattcacaattttcatatgtccaaaatccgtgtatttttatcaaagtattaccatgcgccttcataactcgtatagcatcttcttgcgcttttgataaatttttatagccataagccacctttttcacctccactaaattctaatttattttcagttatttccaaaatggaaacagctactccagcagccccgggttgtcaattttattgccgatcacttcaaaattctctgaatcaaaatcatccagttcctcatagtcatcacagcccggctcattcgtgcaccatccgttttcatgccacacgacacgctttctcgtctcatcttctggaaactcaacgtcgatatgccctgagagaatatcattctcaaaaatcagcttgccgttcttgtccttaagtccggtgcactggcagatagtggatgggtctatcctttttgaaaaatccttatactcactaggatatatccctataatttcaatttgttctcccgtctcaatatgctgatgtttatcaacaatcagactcccaacaatccattcgccgttatcaatccgctttccacggaataaaaatctattctccatgttcaccctccatttcttttagcttggcttcggcttcctcttttgtaaggaatacggttttcccaaaatcgcattttctaaaatacgctccgataaagtgatttgttgcttttgcataaattctatattgctccccgcattcatagaaagttacactagaaataaaagcttcatacacttcatctttcatattttcatcatattcaatgccatcaaacacattaaacggagaagtaactacccatacggtatctcccaccttgcacggcaaccgcagaagcaatccctgctcctcggcatcctcgtagtctttgagtttccgatatacggcatctatttcctcgcaatccggttcacatgccctttcccacagttcatcatcaatccataatggattcctttctgttaatctctccatgctatccctcactctttgccttaagccatttaagccatccttttttatcccaagtgcttccaccaagtatgtctttcgtcacagcatcaaaccattttgccagttcctcgtccgtcatgctccggatccggtctgcattggtcatggctttataatgctcacagttgcgctccatgtctaaatgtgggctgtcgttaatcttcggacaccacttaccgacaattacatcatctttatttgacagattatataagttattgcagttcttacacttcggcatctttttttctcccttccgtgtctttatctccaatcaattttttgaccacatacatcgcaaaatgaatacctgcctttatttctgtagatgtcacgtatatgttttttacatgcagggcagtagaattctttccgcgcatacctggttgccacttttcttggctgctgtttcatttttgtgtccctgcatatctgcaatgctttcacagcttttgttaaagcttggagcatatctctattatctttttgggcttctatagctttttccaatatttctatggcatcatttatcgacattcattttccctgctcctttctgcaccgcaactgatacggcacctctctgaatctcttaagcgcgtcgctgctcacatgcttgctcgggcgtgtcatcttctcgctgatctccgccacgcgcctacggcgctccttgctgtctctatgcatttatctcgccccctgtattcctcgatcgtaacgggcaccaccttggcgacgttttaaccaccgccagaacctcccgctccgctgttttgcaaattctcatgggatcaaaccgctcccgctggatctgaccgcaatgctcacactttgcacagatatgcaccggctcataaccgtcattttctgtgacgtaccggagaccgtttttattcacgtaatacaccaagccgctgtattcgcacccgccgttcagcgccgggcgtatgatctcatcgtaaatctgtctgatcgtcttacccgtttcaagagctgccacaatatcctctcggtacgggtcatacatgctcgttctttttcttctctccattgccctgtcctctcataactttttcaatcatctcttcctggttccgctctgcgatatggtcccgaaccgattcctccgggaatgcaatctgatatgtccgctccttgatccggttcgtgatccggtcatcgtaccgcaggctgtccaatgattcgttacttgtgaagattgtcactttcttgttgatgtaccgctcgttgataatctggtacatcttgtcgttgatccacgccgccggggattccacgccgaaatcatcgataatcagcacatccaccgtgttaagcgcatccagtaaccggctctcactgtattcggcatcccgccgccatgtattcttgatctcctgcaagatggtcagcgataccgcgaacttgactgcatagcttttcatcaactcatttgcaatcccggcagcaatccgggtcttcccgctgccctttgtgcgggaccagataaacagccccatcccctgctccctctgggttccgaaatcttccaggtaagcctttatgatccggcaggcatctgccaccgtctttttgctgtccggctgtcggtacacatccgtgcggaaggttttcaaatccatcccccggaacgcttctggtatatctgcaaaccgcaaccgccttgacatcgccgcccgctcccggcacttacattccaccgccgttgtgataccgtccttttcggtcaatatccactcggtaccattgcacaacgggcacacatcagaatccttcaaattctccggtgtctccaagttccccgagccgctcattgatcgatttttcatgcgctgtagtattttctccagcgtttgttccatctgctccattgcccgctccttttagatactgcataaatacattctcacgaagccagttttccgctttcttgatataccgctccgccgttctgtcccgccggcaagcatccgcataattctgcgccgcccgtatcagatcatcctccggtacgccagccatcaccgcattgcagtattccgattctgacaggtagccggtacattttttcgggtaggctgcagcaaattccacgaaccgctccacgggggatatagggggtgttttggtttcgtttagtttatgtttagtaataggtacactttgtggttcacactgtggtacgctctgtggttcggtttgtggtacactttgtggttcacactgtggtacatttttaacctcgttttgtaccacaagactattcagatgataaaccgcagcttggtttccccctcgggaacgccatgtaatatacccatcctgttccaagcggtttctcgctcttttgattgcctgtgcattcagccccgatttcagcaccaggactgatacggctaccgtaaactcttgctgccaacccgttttattcgctatggacataagcgcatgccataaggcgatggcgggtgagggcagcgggtttagttcgagccgatcgtagaatgcttttatttcggctatgtaattcaagcgatcacccctcttctaactctgttattgtgacctctgtcctcggctcccacttatcaacatctacataacttccatccgtagaaacgataattttgcaattatcatccgacagcactccgtaatgcaccagaatgtcatgtaaggcttcatgaagattcgtaagatcaaccctgcggttgttcggcatgtaatacaccgctttcacgttcaccttacaatcaatagtttctatgtccggcatgaatttttcacactgcttttcatattttttatatgccgatgacggaacgattctcggacgccctgttttgtccttaacaatctgctgactgttctttttcgtgatcggttttaatttaatcgtgaatttatactccatccgcaccacccatccgcatctgtgcgttgcaatcattgatctgctccgccaggtacgccggaagcgtatagcagtcaacaaattcatgcgcatctgcgagatcctttctcttcaatgccttgtaactcttcatcttgccctcatcatcgtagattccaaattcccggcggagctggttgtaaatatcccgatacactctctgccggatcgcattgtccagatatgcttccgttttcttgccgccgagaagttccgcacctctgcgtctgatatgtgccgacaattcatccgattctgcgccgaacagcggcatatcgttctcgatgtggtcgatgcggtgttctaccttggtcacacgcttatctacgatcagtgcggctttcaactctggcgacatcccctcaagcagattgctgtgatcaaaataagaatcaaccagacgatcgtatacttcccatgccgtatccgtatttaaagattttgcatggaggaacgcacccttctttgtccagaggtaaagtttattcaaatttctagcgaaacctaaattttcggtttcgctcttgaaccgtttcagctcctcaccatccagacaaataaaatgctttccttccacatatctgctcttattgttgttaaaattatctgtgattttctttgcttcaacgccatacgcttctgcaatctgctgcgttgtcagcactctcatgcctctatattctgtaacctttaattcttccaattatttctcctttcccctccgggacgaccccggaggtatcatcatggcttcgacagttcgtgatataataagtctccgcatgattggtttcttttgcccgcaggcgggtgtttcaaccctataaccagctccgcccgaatatccgccggaactcttctctgcttccgtaatggctttcaaaatattcctgtgccatctgcttaagcttcagatccatttcagcggcattcttccccgcctgcgttccattcggatgcagatccgggcgaagcggtatgacaaatccatacttctcgctattcttccggttcggattacccgggaaaatatgatggcgttcaaccggcaccgcgccggtaaaatagcaatgttccatatcatccgtgaatacgctccataatcgcttcatattccccaccgctctttcatttcctgtagttctgctggcgtaatggtatctattccaagttcctttgcatccgctaccgttccgtcaatcagaaccgacatttctttcgtgtcataggtatgactcccgcgatagattttatatacagtcagttttccgtcataccgaaccggcattgcatggatcgtttcctgttcccacatatattcttctggtgcgtttgactgatagtagaaaatatttccatctggaagatattcgggctgtccatatttacagatcagaacatttttagcttttgcctttgaaatcgtgagtacgtcagcaatttttccaaccaacacatgaaagtaagcatttgcatcaaggctccgtttctgcgtatatctgacagcttttatttttagcttgtcctgattctgtaaattttcaatttgaccggctgccgaagcgtcaacctcaaacgtgaggatgatgcctcgtccatcaaatgtccggcttgcaccagttagctttccggtagtctccatcaggcatcagcttctttccttttcttataccaggtctctacctgtttgatcagcttgtttgccagctccgtagaaatatcagatgtaccggaaaaattgtacattttcttaagctggttcacgatatctaccgcatttgcgttctcacacatttcagcataggcatccacaaatctattgattttatgtaactgctctgctgtcgccggtgtaaactgcggtgctggtgcaactggttccggtgtctcgccgtccgggtctttcatctcctcggtcggaatgcaaaatacctgaaagcatgcatatttaaatgcaatcgccattgccttgttggttgctttatctccactgtccatgccctcgccaactgtgattgcttcaatagacgagccgtcctctgcatagaacgtatattttatccggcagatggaatagatcagaaccgcacccttatttgtggttcgctcctgtctctgctgttccaatacttccggaacaataaaaacatgattctttaccagcgccggattgattgcattcatgaccgcatcaattccgcggtacttaaagccctgctgtttattcactgcatctttaccaaccgccccgatctcttccatgcaccgagagatcgcttcatatatattcatttttcttgctgattctgccatgcttataccctccggaattcaattccatactcgcgcatagcagattcaagctgtgcgatctggaacggatcggcaattacttcataccgtacggttcccgccggcgccggagcagaccgcacctctttttcttcctccagagcaacatccggcacaacttccggtacaaccggttcttcatgcaccaaagcagcttttctctgctcttcctctgccgcccggcgtgcctcctcttctgcctttctctgctctccctctgcctgtctccgcagaatttcttccttctgcttctggtactgattcatggttgcaatggcatctgacagttccagcgttgccttatacttcgccaggcctttatcctcaaactccgattccatcgcccggatagtgtccagatctttctctacatgctccacatgtgctgtgatggcttctgtgatagctttctgcgcggtcgtggaattctcccatctgctgtcatagatgcgatccagcggcagatactccatcacggttccatgctccgccataatcccggtatagatttcacagatcatcgctttctttgcttccacgcgcctacgctcaaactcctcgatctgcccgctgataaagtcgatcggttcatcgatcagcttgtccagttccttgacctgcgcttcaaaattggtatacggcgccataaaagttttcttgatctcgattcgcctgtcgctcatggcctttttcagtttacgcaggcttgccaccgtcctttttgcttccggctgggattctacggtaaacaccatccccttgtactcctccatttttgccgcaagggctgccttgatctcttcagagttggtctcgatacttccgtttttctgctctactaataagttaatttcctgcatcttctatctccttttcttctctaaaccgctcatcgcggtcgtatattgctgccagtttctttctatgccgctgtgcccgtgcctgctccgcttcgtattcgtcccagtccggcgcatccggcgcgatctcaatcatcgatatactcccactctcctttgtcgccattgtcactgatcttaagtctcactgctgtctctggcgaaacagccagcaccccgctaatgctcccgtcatccgtaacggtaatagtggcaattcccgcaatgccgaccccttccagtgtttccggcaattcccgcaacacatccacaagattgcacatatccttgttacataaccttgctttcattcaaaaaatcctccacttccagctgcgtccattccgttgcccgggtcatccgctccatcttctcctcgcggcgctgccgttctgtctccccggtaacgcagtcatcacacataccattccgaccctcgcccgggtccatcatgcaaccgcagcacctacattgatattttccatacattgacataacctcaattctagtgttacaataaacgcagaaatacttatgtattcctacggtaaatagcacctgcgttcgccaaaacagtcagggtgctatttttttgcctcatgttccagatactccgttcttaggtcgtatacaaactgacacagtttttccgccacttcatccgccatctcatttcccgaaagatttctcacataactggttccgcatatataacatgtgagcttgcggatcatatcccaaacgctccaataaacatacgtgccaaaaagcttgtacataatagattccgtattgcaagatgcgctcgtaaaccattttgaacgtggcttctttaaaaccgactgtgtatcttcgcgaatgaccgttcctttcatcttttctaaaatctgcttttcaacctcggagacaatctcctgtttttcctgctccgtcaccttcccacctcctcaatctcaatccacacaatatccggcttgtccatctcgatcacaacctcggtgcgccgccgctccgccagcatgcagatcgcatagcccgcgccgcccaggaagccaccaatgatacacaacgctcccgcaaggtagccgtatacatcctgcgaatccagacagcatcctgcaagcaatgccgtgactacgccgaccgccgtaacgatcttacctattcttttcaacgttctcacctccccgatcccgttgttctgaaactccattttctacatatctacaacaccctgccagacataaccggtatcttcccataacttcttaggtgatacatatacatttcttcgattttcagaacaggttccatgtcctatcggcagccatccctcgataatcccatttcttacccaagattctgatttcccatatattttcgcaaccagagatgtcggtatttttttattggaaaattctggcaccgctgcaattcctacaattaaccgtgcaattttctccaattggtcatttgttactttcatttcctgcaattcttctggcaatgatctccctcccttcttatttgctgtccaaactattggacagatgatgtggtggcttccatttcttcccctcttgtgatatgattttaaaatgtaaaggagaagctattcatgtacctattgattgtttttttaggaattgtaattctcaagttcgtgttaaatctttcccggcttattggaacactcataatgtttaaaatatttcaaaatcagccgaaaaatatagcccaatactgccctttcgtaacttcactgtttaactctgctggaactcaacaaatcattttgtctgcgactagagccagcggtatcaaccaagctcaacgcgattacatatcaaactcgttatctcgccaagacacccgaagtgaacttgaaacaatttttcaaaaaacaatcggcgtttataagttccgaatgttacaaaccataaatcctttttactggttgtttctccctaaatttattttggaagattttaatgtagttcttccaaaggtcggtcaaacattgttaaacctgttctattgggttattggttttgttggaacatactttcttgaaaagtatctggatgctcactctcaagatttttttcagcatataatcgatatgcttccgtaataaatcttcttatctcactacgttctctgcgacttacggttttccgaagtcttatcacttcgtcaaacattgcctgatacagtatggcatctactttttctgcatccgttccagtaaataccggttcgtttatcgtcactcctcaccctcctttctccgtttttgccacaaactcacgtttcgtgagttttttgattaaaaaaaattttatggataggcttcttataatacgcggatatgcgtattttaatattatctcttggaattctctcacctctctcatacatagataaagcagatttgctaattccaatcgcttttgccacctcctcctgcgtcctatttccgcgcaatttgattaaagtctgacctattacatgactatccatttccgacactttctcacctccgttcactcacgtttcgtgttgataaacttaatatacacatttcgtgagtatttgtcaacacatttcgtaaatttagcatttgatttttttcacgtttcgtgtataatcaaattaaagaaaggacgtgatgcacatgccagattttaaagatatgcttaaattttttagaatgcgggaacatttatcacaaagcgagcttgccgaaaaacttggtatatctgcatctactgtaagtatgtatgaagtaggaagacggcagccagattttgaaacagaagaaaaaatagctgacttttttaatactgatctcaatacgcttcgtgggagagacaatgaatcagagcaacctgcctactatttagataaagaatcttctgatactgcacaatttttatttgacaatccagaatacaaagtattatttgacgcatccagaaaagtcaagccgcaggacatccagtatgtagccgatctcatcaaccgcgtttctggcaattctgacgacacaggatgttgatgtccaaataattgtacatatgttatgtcacaatgtagtccacagatagggggaatggctttggataatgtaagaacggtgtactgtgatcttccaaacactgtgggcggatttacagttgcaactccggacgacttttttacaatcgtcttaaatcagaacttgtcttatgaccgaaatgtgcaaacttacaagcacgagcttgagcatatcaaaaacggtgactttgataaaacatgttctgctgatataatagaaatttctgctcatcattgattgcaggatatactatacgtgtggtaaaatattcctaattacaagtgaaagagagaattgtgatgagattattgaatttctatgaatcaaagtcctaccataaaacatccaattaacaagatctgctttcaataaaaaaaacgtcttctgtcgaactgacgtttgattattggaggtacatatgaatggcattacaaaaacaataaaattctacaaatttgaagcactgccgtctctttctaataatggcataacccctatgaccactattgaagtattaaatgctgttttcgctattggtgaaagttataatgtaaattatgacaaagaaatgtataccattgacattcttgaactgacaccaaattacgtctttgggaaatgtgcaaaagaaaatgaattacctattacaactttctatcagaccagaaataaacataccaataaaacgaaaccttattcatcaatttccccagacacccagcttgaagtttatacttttttctttattgactgttgcatgaatcgaatgtctgcattacaacataaaagcataaccaaaattcaaaacatattaagtgcagcgatttggcaactttctaaaggcactttagaagttttttgcgctccagagcgaatcaaagacattaagcatactgcagcaaaaataaaacgcaacagaaaactagccgtgtcatttgctcccaacgctatatcaaaatataatatcgattctttatctaaagaacttggcggaattaaatatgattccttttccatagaactcaaattatcgccaactactaccgatgcccaagttaaccatatttatgacaactatcagaacaataaagaatcttttaatggtttaaaattgataggaaaaacagatgctggaattgaagaaacaattgattttattgaaactctatttacacattctaccaactttgaaataacagaagacacaataaagaattatgatataataaagaaaaagctatctgaagcattatcaatagaacaataaatacaaggaggttagaaattgaaaaatatattaggttttatgaggtatcattcatgcataatttttccactattatcgggaatattaacttattttttttaccaaaaattcaattttctcaacataaacgatactgacaaaataaccttcttagcttcccttgatgcatcgctaataggtgtattgatcacaatccttacaatctatttagctgttccgaaaagtgattttgtaaaaaaacgcttaaaagattcaaaacatgaacgcatatatttatgcaatatattgattggtattattgtattgtttgtttccattttatcatggattttttttgataatgtaaaacttttagtaattttattcattgctggcatatccaacattgcaatatcaatatattatacattttcactgatcaatctaatataataaaaaaccgccccactccaaagcgggacggtcgcgctctcgaatgatacgaaagccctagacaagcatattgtatcattcggagcagccaagtgcaagcggaacacacgttccacgctggctgttatttttatacccatttttaaggaggatgatactatgaaattgccaaatggctatggctccatcacaaaattaaccggtaaccgcagaaagccctggatggctcgcgttacctgtgatgaaacctatgacgaaacgaaacatgattatgttcgcaaacgtattgtacttggatattatccaactaaaaaagctgcgctagaagcactgtctatatacaacgaaagcccgttcaaaccggaagatgtaaacattaccttttctcagatttatgaaaaatataaaaaaagcgccgcctatgcaaaactcaaaagttcagcacttaccagccggcaaactgcttataaatactgcgccccgctttatgatattaagattcgcgatcttaataaagatatgttgcagaatgtcattgattcgatccagctcggcagttcttccaaaaaaaacgtgctcaccgtcatgcgcattgtgattgattatgcttatgatcataatcttattaacaaaaaatatacggatggcatcaacatcgaatacagtgatcctgttatcgaccgtattccatttaccgagcaggaaatcgaaactctgtggtccgtgtccgacgattgggatgtaaaagtcctgctgatacttctttactccggtatgcgtgtaaacgaattacttaaaaactaccgggataatgtaaatttggaagaccactggatttatgttcccgccgaattggccaagaataaagaaagctgccgctatgtgcctattcataacaaggtttatgatctggttaaatggttcgtagataactccgcttcttatggacatgacaaacttatgctgaaccctaacggctctgtgattatgtataataattttgtatcgcgcaatctgccgcgcattaacaaatttatgagtgttgagcataaattccatgatacacggcacacgtttgcttcaaaaggaacctctgctggcataccagagttgtatatgcagaaaatcatgggacacactccaagaagtattctttataacacttacactcatattacgataccggagctactagaatggattaaccagatcccctgacccttgttaccaacgtgttaccaacgtgttaccaattctatattttatataggttctaagtaaaattgcacaaaaagaaaaagctaggattttcaagcatcctagccttttctgtcattatctgttatgaaacttgtccaaaaatcctaaactctggacagatactcgcctgtacgtgtgtcgatcttgatcacatcgccctgctctacgaacagaggtacatatacggtagctcctgtctcgacgattgccggcttggttgcaccagtagcggtatcgcccttgaagcccggctcagtctcagtgatctgaagttctacgaacagaggcggctctactgcgaatacgcttccgttatgggagcacatcttcaccatctcgttctccttcacgaacttcagcgcatcgccgatgtcatctttggagagtgcgatctgctcataagtctctgcatccataaagttgtataagtcaccatctgcatacagataagtgtaatcttttctgtcaatgcgggcagtcggacatttctctgtaggacggaatgtcttctcaaccacaccaccactcttaatattctttaacttagttcttacaaatgctgcaccttttcctggtttcacatgctggaattcgataatctgatagatattaccctctaactcaatggtaataccatttctgaaatcgcctgctgaaatcatgtaaatttcctccttaaaaatacgctcgagttttactctctgatttttctattttataataaacagcgctatatttcaagctttttttcatataccgcaatgtgtcatgcgaatttacacactttttaatctgctttgaacctgattcacacgatatccttatgcgttgtgtctctcaatctcatggatcatatcgattctggtctggtgccttccaccctggaattctgcatccagatatgccttgacgatgtctttcgcaagctctgttccgacgattctggcaccaaatgcgataatgttggcattgttatgttcttttaccagacgcgcggtcgctgtatcggagcacaccgctgcgcgcacgccgttgactttattggctgcgatggagattcccacgccggttccgcagatcagcacgccgcagtcagcctcgcctgccacaactgccctgccgactttctctccgtattccgggtaattgcagctttccgttccatcggttccgaaattgataacctcatgtcccagctcctttaaatagtccataatgacaaattttaactctgttgccgcgtggtcatttccgattgctattttcattttttcctccatcccgggttttctgcgcccgtccttttcattgtcacatgctgccactgttttcggcagcccaaactgcttcttttattgcttctgcgctgcgctctgctgcttttggcattttctccgatagaaaaacaggacgatcttttccagataacgctttaagacaatctggatctcctccttcggatggatcggctttaccagaatcgtgcggattcccgtgcggttggcgccgtagacatccgtgaaaatctgatctcccacaaacaatgtgtttttctcatccgttcccatctgttccatcgcttttctgtaattcgccggattcggctttcctgccttgtagatataagaaacctgcacagcgtcattgaacattttcacacgcggttccttattgttcgacagcagcatgcaatgatatcccagctccttcaaatgtgcaaaaagcgcgcacgcccgctcgtccgccggcgcgccgtgcggcaccagcgtattatcaatatcaaaaataacgcctcgatatccctcctcataaaggcggtcaaaatcgatcgcataggtagaatctacgtattctcccgggtaaaaccgttccagcattgcccttttgctcctttactcatctcacttagtgcgcatccttacatagattactacatttctaccaaaatatccacccggaatttccaattcgcgttgttcgtttttctcagagcattatttacctcaccgcgaggtgcgcatccccgcagagcgtttttgtgtaataggaacaaagtttcctattacacaaaaaagactgcatacacatgtgtatacagtcctcatccgctcatgattctacagtataaaattctcatccggtctgaccggctgtgcctcgtcaggattcgttcccacaaaaaactgatactgctcgagtacctgatccttacgcatatccgaaatggcgcgctcgacatccagtctggcaatgtcgctgtccacgcccttcagctcgtagaccgcatccggctggtagctgttcgcgtaatcgatggctccctgatccggtccgctcttcctgatggctgcaggcgcagtatactcctctgtggacggtgcctgacctgttacgctctgcggaagttctgccggcagttccgatcccacggtaacagtttgattctctatggagttgtaatcataaaatcccgcactgatgcggattcctgacaaattcattagaaactctccattgtaaccagaaaaaaatattactataactttttattatatcgacaaataaaaacagaaactttaccttctgttcttatttgtcgagcatttttttcagctcgctcataaacgtattgacatccttgaactcacggtacaccgacgcaaaacgaacataggcaaccgcctcaagatccttaagcttatccatcacaagctcgccgatcagggaactcggaatctccttctcctcgcggttaaagatctccgtctccacttcatccacaagctggttgatctgattgacagagattggccgcttatggcaggcgcgcaacacaccaccctcaatcttggaacggtcatactgctctctcgtattatctttcttgatcacaatcagcggaatggtctccactttctcataggtggtaaagcgttttccgcaatcatcgcaaagtctgcggcggcggatggaattgttgtcatctgccggtctggaatcgatcactcgtgtattttcactgctgcaaaatggacacttcatttgctacctccatgggcaattttgcctatatattgtagtatatctatacatttgttgcttgtcaatgaaatttacacgattatataacctgttttttatgtattttcacgaaattgtcattttttgtacaaactttctgttttattgtcccctacgcctattttaccttatgttttgcttctttctcatcaatgtccaccagaatgatgtctggtccgattttcacaatcttgcaccacggaataaacaattcaaattccctgcccatacagcccatccactttgccggtcccggcacaatcagcgccttgatgcatccgccgcactcgtcaaaatccagatcccgcacgtttcccaggcacttgcagtcatttacgttgatgacctctttcctcgccagatcgcaaaaacgcatatacttcccgcccgtttgcttcctcggaaaagtatatgcgtctcttttcaaaatcatgtatgtctaaaattatacgttaaatcggaacaggatcacgtctccgtcctttaccacataatccttgccttccattccgacaatgcctttttcacgcgctgcagcgaggcttccgttgtccagaagatcctggtagttgacaacctccgccttgataaagcctctctcgaagtccgtatgaatcttgccggctgcctgcggtgccttggttcccttcttgatcgtccatgcacggcactcatcctcgcctgccgtcaaaaagctgatcagaccgagaatactgtagcttgccgccaccagcttgtccagtccgctggattccacccctagatcgtccagatattccttcttctcttcctccgaaagttctgccagttcctgctcgatctgcgcacagataacgaatacctttgcgccctcttctgctgccatctctcttacttttgcgacatgcggattcgatgcgccgtcatctgcgaggtcatcttctgcaacattcgctgcatagatcgtaggcttcgctgtcaaaaggttgtatcccttgaaccagatctgtgcgtcctcgtcatctggcacctcaaaggatcttgccatcttgccgtcctcaagatgtgccttgaccgcctctacaagttcgagttcctttgcaagcgttttgtccattctcgcctgctttgcaatctttgcgattcttctgtcaaggatctcaatatcagaaaagatcagctccaaattgatggtctcaatatctcttgccggatcgatcgatccgtctacatggatgatgttggtatcttcaaaacagcgcaccacatgaacgatcgcgtctacctctcggatatttgcaaggaactggttgccaagtccctcgcccttgcttgctcccttcacaagacctgcgatatccacaaattcgatcgttgcaggtgttaccttcttggtatgataaagctcaccgagctttacgattctctcatccggcacagaaacgataccgatattcggatcgatggttgcaaatggatagtttgcagacagcgctcctgctttggtcagtgaattaaataatgtagactttccgacatttggaagtccgacgatacctagtttcatatatatctatctcctttatttcctttttacgggctttttgctgtataccgctttgactgctgcgccgttctcccaaaatccgtcctgtgcttcggcggaccaacgctcctcgcagctgtcttgtggcactattctaagaaccccaaattagcacgattattatacactaacaggggctcgtttgcaatgttatttcatttttcagaacgctcagacgtatccatggaagagattcttggcataggaaccgcgcttgctccaacccagaaccggaaatatttctcactttctctttataaaatattatactgtatcttacaatccccggatgatgttcaaataatccggtctatggtctacgacagcataaataatagcttcctgcttctcctcatttatcttgtaaaacacaagatttttctcaagtaccagtactttatacccctgtcttttaagcaccagataacgaagttctacacatttttgcggatacttgcctaagtcaagaagattccgttctaattcttcaagtttttcaagtgcaacttccattccaaagttttctgctacatacaaaataatctttcggatccgagcatctgcagtttctgtccggacaactttataattcaatattctatccctcccgcagcatctgccttaaatcctcaaaggtctcaccgagtggcgctactcttgcgttcctcacatcatcttcttccgtattgtctccataaaatcacctttctcgaatacatcgaatatacctcacctgaaatccatctgatacgatgaccttcagatacaaagaaagaccgctcactttcaatttttcttgaaaatgaacggtctttcatgcctctgttatttagttgaatgatgatgatattattttctctttgatacgtttccgaagccgcagtccaatacgactgagacattcacaccatctgaaattacttttttgtatgtttttcggtcactctggtcaaacctgaaaaacctctcaaagtgtcggaagtcgagaagttttacaaatctgtccgatatagtacaactatcgtctccacatgaaaggactgctgtctatgaattaccatcgtggaaggaaacatatccatgaaccttttaacaataggtcgaggctatcgttaaaaagtgtcaccactgaaaacaattttttaactgttctctacttttgaattgcttctataatatatgtctttccttggaaaggaacctcatctccaatccagcagcaagtaatttttgtttctgtgcaagcagctctgtatttcctggatcaagttttaataacttgtccacgtcctttagccgctactgtgtactttttatctgaccgtttacacattttaatgctatttgtagtttgtctgtatctccgccaatctcgacagtaatacccataattctgttagccacggccgatacctccttccgtaaaaatgggcataaaaatgcacagatttctccattcacgaaaaaagcaccaaccatttctgattgatgctttcaaattattttgtttttgtaaatctgtttaattgcgtatccacatctcgtccaccgtacataacacggataatcgtaaccacttgtgtatcatcatccggaatatatagaataagataattgtctactggcgctacgcgtagccctcggcttttccatggttccaattcatattgtcgatatctcttcggcatatgatcaagatccataatacatgcttcaagcctatcaagctgaccacttgcattttctggtgcctgcagttcaaaagcaatgtattccaagattccacgaaggtctatctcggcctgatctgaaatcacaatatcataaatcataaattgtaatccttgcggagatcagcaaaaacagattttgctgatctagtgcgaccagcctgcatatccgcatatcctttctctagttctgcattcatctgtgcttctgataatgcactaacgtctacaggacgagcggatggcattttcacttcaaaaggaagtcctctttgaagaataatttgtttgtaaaacatatttattgcattggatgcaggaattcctaatgctgctaagattccttctgcctgttcttttacatcaggctcaatgcgtgcgtatacatttgctgatttcgttgccatagtaaacactcctttcgagtttttctaactatattatatctatttgtacggacaaaggcaatacaaaatcaatattttacaaattgtttatactccaaaatctaccagttgattaaaatttgtcgaagtcctcctgagtcgccacttccttatatcctttataatcatcgtcactgttttcagcatacatatcattcacgaggccaatggtaagcaaatccaggtctcgaatactaatccccagttgtacgcaacgaagcaaaaataaaggtgttgtcatcgggcgatctgttggacgaacttttacggattggaatgtgagggaaattctcgtgtattgtgttaagcacatccctatatcctgcaatctcacgctcatttcttgtctttggcattgtcttatccaaaacaatctttttcaaacattcatcagaagtatagataccctcaattttattagaactctctgtactttgaatcttagccacctcaacaagactttctaatacatccgcatggtgttccgcaattaagcgctgttcccccttgtattcatgaattgttgtaaggtaacgcacgatttctggcgtaagcatttttttccattttttcgtgtaatcaaattgtctcattctaattacctcattttgaactcaacttcgtcatttcattcattatgacgcaattgaaaaaggaccagcccaagctgatcctaatcctctatcacatcctcaattctattgtctctcaaataagaagaaaaagccaggcctcatgctctgcttaatctccaatgcatttcattacaaaaaatgacatcatcgtatagcaaatacataaataccccggcaccgcatgctatatgtgtaccacatccgaggcaaaccatacccttacacctcaatctcacgcccgtgaatatcggtcatacacagccggtttctcccccgcctcttcacacggtagagcgcctgatccgccacgtggagaaaatcccagttcttgttcccgttgctcgggatgtcatggcagatgccctgcgagatggtcacaccgaaagcgccctctgtatagcgctgttctatttgaagcgccatcacatcctgccgcagcttctccgcgcgctcgcagacttcctccgcgctcattccactgtaaatgatgacgaattcatctccgccgtagcgcgcacagaaaatctgatcactttccatctgccggatcagtgccgcgatggcacgcacacagtcatcccccgcctgatgtccgtaacggtcgttgtactgcttaaagtaatcaatatccaaaatctcaaacgacaacggtttatgttccgcaaagcactgttccacgatcttttctgaatcatttgtcagacggtaccggttcgccagtccagtcagcggatctctctccgatttttccgtcaactccaccgcatcctcctccagcttcctgcagcgctctcttgcccgctctaaggatttgcgcagataaagcatattgacaatcatgcttctgttttcctgttccacgatctcggtcaattcatagaatctgccagccgtcttaagatagcgttccctgtccttcgttttcttaacataatccatctctagcgctgtcatcttccgctgcatattggcgatgccggtctgctccacgagtgccttcagtttttctccgatattgcggcagacatcaccgcggtcaatctctaacatcagttcacagaaatcatacagatcatcaaacaaatccagaatcagtacatccccagaaagctgattctgaatatccgcaatatactggtctctcatggaaatattgccacacagatgacagtaacgtgcacgcatacagtttacataaatgtaatccatctcctcaaaatgcgcttcgcactctgtctccagtttgcggatatattcctctgccttctccaggctgccgcttttcatataacacagggccagattgttgtaaatcgcggtaaggcttgccaggctgcgctcctcttccggtacgcgcttgtaatcgagatgtgcctgctccagataatctctggcatcactgtactgtccgcactccatatacagggaacccaggttactctcaatccggctttccacctcaatcagctcatattttttgcaatattttaatcctgccagatagtactcgatcgcaaacgacagattgcccttgccgacggatacaatcgccataagattgtaggcggctgccaccagttcccactgcccggactgttccagatatccgagtgcctcgccgatctcctcaaacacctttccggtctcattgctaagatagtaggttctgcccttgtaataatgcgaaaatccaagcagcctggcatcccccgcacgttctgcgtattcctcaatctgcgtgcagtagtcaagcatgcacgccgcatccgtgccgcggccctctctcactttctgcatcagatcttccatccggtcatcggtcttatgattttccctagcaagactcctttgcttttatctgttcgttcgcgctgcaatattttcttaacttctacacaaatacatacttccggagacgctccatcgcttcctccacaagtgaaaatggcagcgccagattcatgcggatgccgcacgggctgtggaacggtctgccatcctgccagatcacaccgatgctggcgccccgcttctgcagctcatcgatcgttatgccatgctttctgcaccactctgtgcagtctaagagcagcatgtaggttccctgcggcatagctacctgtacgcccttaaaatgggatctgatataatcatacgcatattctgcattcttcgtcaataccttacataattcatctgtccactcatagccttcttgctgatacgcaccgatgagtgcatacatggaaagcacgttcatttcattgtaatgtgacagcgatgattcctttttcacgcggtcacggataacgggattgtaaataatatgataacttcccaccagacccgcaagattaaaggtttttgacggtgcgtacattgccaccgtgtgcattctggcatactcggaaacgctctgcgtcggcacgaattggtgatccccgaggatgatatccgaccagatctcatccgcaaccacctcgacttgatacttctcatagatttccatggcacgctcgatctcccagcgctcccacaccctgccgcacggattgtgcggggagcagaaaattgccgcatgaatgtggttctcgcagatttttttctccatgtcttcataatccatgcgccacacaccattctcatccagcacaagcggactgtgcacgatctcatacccgttgtttttcaggctgaaggtaaatccgatgtaggtcggcgaatgcacgagcaccttatctccccgcgaacagaacacattgagtgcgcttaagacaccgccgagcaccccgttttcgtagccgatgcattctctcgtcagcccctgtacgccattccttttcgcatgccagcggattattgcatcgaaatattcctctcttggctcaaaatacccaaatgccggatgtgcgatacgatctgtcatcgccttctgtaccgacggcaccgtggcaaaattcatatccgccacccacatcggaagcaccgaaaatccttcctgcacctgcacgtccttgtagggaatcttatctactgccagtgcgtcttttccttttcgatccataatcgttgtaaaatcaaatttcatccttttttcctctttcttctcactgccatggtcgccgcaaagagcaccacggctgccgccgatattacggctcccgtcagaaatccggggcttttgtaccgcagttcaaactcatgtgtgccttccgtcagataggtgctgataaaagcgctgccaaacgtctcactgtcccttttctttccgtccacatacagcgtccagccatcctcatccgcgatggaaaaaatcagtctgcccgcctgtgtgacgtccacgtttccctttaccctggtatcggaaacttccgtcacttccaccgtctgtgcggcaagcgcctcataggccgtacgaaacgccatgagatccagccggtaaaccacaagctgcaccagctcattggcggtgttagtaacttttacctcttctcccgcctcacaatatcccaaatccagaatatatccgtgggaaacttttgtaaagcctctggttcttcccgagcttacctgctcctgcagattgtcaacgcccgtcttgctgtaggtggcataataatatgcggaatcctgcgcgacaaaagagctctctcccgcctttgattcggattccaccgcggtaagaagcagtctgtcgcttcccagaagattggcgagctgattctgtgtgccgatgtcgcctccgccggcatagtcccatttttccgccacatcttcatccatcatgaatcccagcggcagcacatacgcattctcatacagatacgtgtctccacgctgcgccacaagtgtgcggagcggtccttcctccatcgcattgtccgcaagcacatagcggatggaaagcattgccgaaagaagcggtgtcgcaccgccggcacaataaaagttcttgccgccctccattccgacatcctgataaaaatggctgacattcagattcatcagggatgagaactgtgtgccggagtggtagccggacagcgccgcatcatttttggtcttgcgctccagttcctccgtccggtaaaacacggaatcttcatcacttttttccgccgtctccgaaagaaccgcccggtaatccgccagatttttcacataatccgtcctgcttatcgtgtcaagccctgtcaggttatagttgatcacaagctccgccacaaccgcaaggcacccggtcgccagcatcagctgccggattctcttttttcctatgagtatgccgagtacaatcacaaaatagcaggcaaagaatgccccgcttgcccatatggaggtctgctccatcgtcgtttcgtccataaaatgattgcagaaaagcaggaatacaacgctcattccacccgctgcaaacacctgccacagctttaattcacggatgtaaagcagcgcctcataagcaatcacaagtaccagaaacgcgtacaaaaaagactgtcttcccggaagcgatgtcgggaaatgaagaccatgccagataaaatccagcatattatttgaaaagctaagccagaaaaacacgacgagtgccagtcttggcagttttttcttccatggaaccgctctgttccacacatacagaaacagcagaaagagcgcaaaaattccgcagtacagattgggccagtgggaatctcccgtgtatacatcgactgccagaagggaccgcgccagctccgatacgatattaaaataccactccatcgtctccgggaacgatattccggatgcaccgcttaaggagagcacctttgccgtcggaaggatcagcactgcgcctgtggctcccgcaagcagcgaataccacgcaaagcggatccatgcccggtaccccgatgcccggtgttccatccagtagagcaaaaaccacagcaccagaaaaatgcagatcatgattgaaatatagtaattgctcagaatgcagaccgccagcgacacataataaagccccggtctgttatcccggatcagccgctctaatcccagaatcacaagcggcgcaagcaccatgcagtccgtccacatcagattccaggcatatgccgccataaacgcgcacagcgcatacgccgcaccgcacagagctgccgcataggatgccacatctgccggaaggcgcactgccgtcttcttctctgtccgtgtgactgccgccgcatttccggcatcctgccacacgtgaaaatgctcccccaggtaataggtaaacgtaagaccgctcagtgcaatcttaaggatggacagaaccgtcataaattcaatcacatatcccctcggccacagaatcaaaagccagtttaacgggctggcaaggtagtacgcatacagggatacaaaatccgctcccagcccgatgttccacgaatagaacggactgcctcccgttttgagtttttccatcagctctgtaaaaaacggacaatactgatggtacatatcaatatgaagcatacactgatctccgaacggatagatttcccggttcacacagatgatcagcgtgatcagaagcggtatgcaaaacgctgccagtaacggtcctctctttttcattctccagactcctcttcccagtcaaacatgaaataatactgaagtttgcggtaaatatccatctcgccgtactcctccttcgccggagtctcacttccgtccgcttccacggtacgcaccgccgatatcaccggatacgattcctttaatgtcagcagaaaattctgataggcatccgtgggtaccccggcgcgctttagcacctctgctcccagataatttgcgctggtgtccgcattctgttcctcatcaatatcgtaattcgcccagatgacatacggcacctggtagcgcagcttttgctgttcctcatccagcgcattccactgcatgccgttcatggcaagaatcggcgccgccaccgtatcgctcggctgatgatccccgaaaaagacgatgaccgtcttctcatccacaccggagaaataatcgatcagctgctctaatgcctgatccgacagctttatcagcgaaaaatattggctgactgatatactgttcacaccgtccaccgaaatacccggtgagaagttcgtgtaggtctggtcgtatcccccgtggttctgcatcgtcacattgaagacaaacagcggtctgccctcctccttctgctcatacagctggatgattttgtccgcacaacttgcatcgctcacataatctctgacaaaacgtgccccgtaatactgatctttaaaaatactctgctcaaatcccagccacggatagaccttgtcacggttccagccggtcgcataatagggatgggtcgccaccgtctcatacccgagcgactgcagataggatgccaatgacgggcgctctccgttcacatactgctgatacggaatacttccctgcggcaggaacgccatcgtattcccggtcagaaactcatactccgtatctgcggtatttccaccgcacaccgagacattcaacatgccggtcacggtattttccgccccctgctgcaggctgtgcagaaacggcagatagtcctcattggtcttaaaatcccctaatacggacagatccgaaaacgactcattcatcacgacaatgatattcggcatcccggtatctgcaccgctctgcgaagtgtcatccgaggcatcttttccctcttcctccaggattgtatcgatcgactcctccgtctcctgcggttcctcatatttttttaaaaattcctttgcctcgcccacactgtatttctgcggtttctcaatcgacatatacgcaaggttcatcacaaaagtaaccggtattccgtccacctgtgtcataaagacgggtgtaaacagcttattgtaaagcctgtgctcgttctggaaattctcctgctgcaaggttcccgcaaacatcacaagcaccgcgccaagcaccacgcccggcaggcaccgcttaaaaaatccgggtctgccaattttaaacttcaccggctgcaatccaatgatcagcgccagaaacagaattgtcacaacgatcatacgcgtatccggtgtaaagtcataattgccggacacacttaccgccgtcctccaggacagaatgtcccacggtaccagcgggttggtgcggaaacgcaccacataggcattggcaagcccgaataccagcgccgcggtaccctcgatccggtatgccgtccgaagccgttcggtgatgcacaaaaaaatccccgcgagcagttcaaacaatacaatgttaaaaagctgcgcccatggccgtacctccgcaaacggattgtgtgtgtaaaattccagcaaataaaaaaatgcggcgggaggaatcaatgccacggttccccacatcacatactttgtatattttaataaagtttttttctgactcattttaactgcctcatattattttggttcttattttagcacactgcatttgtttttcctatttaattcgcaaaaaattcacaaaagcacttccgtatgttcttccagttttccacatactttgtcgaatatgactcattttttgacacattttgttaatagaccgctttgattcacacaattcaaacaactttcattgacatccgaaagttcttcgactatgcttacacttgtatgataaattcatggaaaaggtggctgttatgaacgagaatctcgaattggaccgcttagcaaaagaaaacgataatttcaaaaaaattattcagacacagcagaataccatcaaccgcatgattgattattttattctgggagagaaaaaagctggactgcaaaagtagcttttttcgtgtgacgatgctataataagcacacagaaaactatcttttacaacacatgatttcacggaggataaaaccatgttccaatttacagatgactgcctgatcgggatcaaggagctggatgacgagcaccgccgtctgttctcattgatcaatcaggctatggacatactcaaccataccgattccaacgaccgctgcacccagatcacccatctgctggaggagctgacgcagtatgccgatacccattttgcacatgaggaggcttacatggagcagatccgcgatccggagctgatccgtcagcgcatgcagcactctcttttccgcgacaaaatccgcgatttttcctttgcagacatcgatgaccccggaaagcagcagcaggttgtcaccgatcttttgaatttccttgccaaatggctgtatcaccatattctcggaagcgacatcatgatcggcaagctgccgccgttagaggaatggatgatccgcgacaacccgtgtgaattcacagacgattatctgaccggcattgaaatagttgatttggagcatcagcagctcttttgcatcgtggagcgcgcctatcagctggtaaaatccaacgacgtcattacgtgctacgatgagcttttatctatcatccacgaactcacggattataccgtaacccactttgccgacgaagaagcttacatggagaagatcggttatgaggggcttgccgcacagaaaaatgcgcacgcttctttcgtcgccagacttgagagcatcaacctgatcgagctggacgaaaatccgcaaaaatatatggagagcctgatcgaatttctgcttggatggctgatcaaccatatcctctattccgacaaaaagattcctgtccaggcataaccgctgcggacaggcacagacaatataccgtacacatttatgccgtacgcatttcaagttcttaaacatgcgctgcgaatccagcatacaaaaggagctgtgaatgatattcacagctccttttgtatgctcttttcaatataatgccggcggccggacttgaaccggcacgaggttgcccccgtcagattttgagtctgatgcgtctgccattccgccacgccggcagtcttgcgatcggatctctccgtctcgctcacgcacgatttatcatatcataccctccttcatattgcaaccacatttttcacttttcacacctcactcctcttcctgatttcattgacaaaagttatcatatatgataactttatagcagacgattttttacggaacacctgtatttttcaggagaattgagggattcatgaaggaacaaagcccgcttaccccgcgctatgaggtcgtggaacagctaaagagcgcgcgcaaggcgcagaatgtgacgcaggaggtgctcgcagagcgcgtaggcaccaagaaatccaatatatcccgttttgagagcggccgttacaatcccagccttgattttctgattaaggttgccgacagtctcgggaagcagattcagatcaggattcgttaagcatgaaggaggagtttttatgacaaaaggaaagattttaggtgatattcaccagattgacaaagacgtggagctgtgccgcaccaccaatgaacgcatcagcaatcaggcggcacagcttctgattgagaaccagatcccctttacccggggctggatcaaggttccgttttttcttcgggaaaaataccgcggtgcacatcagatctatgtgatccgcacgaaccgcaaccgctacgggcaggcaagacgcaccatcgaccagctggacacttctttccggcgcagactgatcttaagcaactactgatccgtacgcacgccatgttcctgcactgtttgcgccatcagtttctcaaacagtgccagaaactttttttccacttcccgcatcgggcactcccggtattccggcagcaccgccgcctgcggtgccacatcaaataatttttctcccgtgaaatgttcaaattcataatacaggcaggtatcatccatgcgctttacaatctcgcgctcccgctccgtcggcggcgcaatcaggtatttttcatagatcatctcctgaagcacctgctcaatcctgcggtattcgggcagacagcccttcaccggcctggtgatatccgacagatatgcctcgctcgcatcgtgcagcagacacgccagaacctccctgctgctgcgcccttcggcctgcgccattgcagcacagtccaggctatgctgcgcaacagaataaaataccggaaaatgcccgttggcacgtgtcattaacgacagcgcatgtgcaatatcctcgatacagatttcttccggtctggggtctgccggtgacatatgtattccggaaaatgtgcgaatcttctctctcattccgtttcctccatgctcttcttcaaaagacgatacaatgctgcggtatccaccggctttgcaatatgtccgttcattcccgcattcaacgccgcactgatgtcctcggtgtatgcatttgcagtcattgcatagatcggtatctctccggcatccgggcggctgctcttctgtgcgcggatcgctttcgccgcttcatagccattcattccaggcatctggacatccatcaggactgccatataggttcccggtgctgattccatataccgctccactgcttcctcaccgttccacgcatgatccacatgcatgttcacaagctccagcagctccgtgacaatctccgcgttcatcccggtatcttccgcaagaagaatccgtctgccgccaaaatcataagactctgacgcatcttcttctgcttcaccttcccccgtctcttctgctttttgctttttctcatccactgcgtgtgccagcggcagggatactgtaaaggttgttccgacacccttcttcgactggcaggagatcgatccacccatcagttccaccagatttttggcgatagaaagtccgagtccgcttccgccgtgatgctgtgccgtctcggcctcctcctgctcaaacggcaggaacagccgctcctgcatttcctcgctcattccctcgccggtatccgtcaccacaaatttatagaagaactgttcctgctgcattggcagttcgctgaccgtcacgcggatactcccgccctctggcgtaaacttataggcgttggaaatcagattcagcaatacctgattgaggcgcagcacatcgccttggacctgctccacctgtacctcgtccatctccacggtaaaggcaatctttttctgctcacactgcgttccatatactgctgaaattgaatccaacacctcttttaaggaaaacggtgcctgcgcaattttaatcctgttgctctcgatcgcagacatatcaagtacgtcatttacaatcgcaagcagcactttggatgaggtatcgatcttatccagacactcttctacccctcccccttcatcgctgcggtgtcttgcgatctcagtcagccccacaatggcattgatcggcgtacgaatctcatggctcatccgcgcaaggaactgtccctttgcctcattggcgctgttggcctgtgccaccgccacagcgagctgctcgtttttctcttccagcttgtggtaatttctgcgtctcaaaagttcaaatgcaaccatccatgcgacaatctgcagcagaaggatgccgatcacggctatcggataacggaacttgtacaccatatcggagagtgtcggctcataggcggttgccagcgtgtgatccaccttaaactgggcaatctctttttctgatatcatcccaatgcacttgttcaaaatctttatcagcatgcggtgttcctcgctgtccaacccgacgattcccgtattttcctccataaaaaaagtcgggacagcagcaagttcctcataatagggatttgccagatacggcgtcagcacgctgacattctgcgccgcaaaatctgcttttccgtccaaaaccatggccagacagtcttctaagttcttctcctcacagatctcaaactgtggtgcattcatctggatataatgttccagcccgacatagcttgccggaattgccagacggtatgaaacatcgtccgcatccacatcatattcctgtccgtttcttccgaccagtgcgacgtcatccgtataaaagctgtccgtcagaatatagggctccttctggaaatcaggattgtccgagagcacccctgcaaccagactgtccggatacttagacagatagtccgccgtgcgcattccctgcggcatcatcacatactgaaatgtcagaccgctgcgctctgacagcagatccagaatgtcaactgtaataccgtcgacatttccttccgcgttccggtaggacaacggtgctcttgaagcaataaacgccaccgtaatcacgcctgacccttgaatgtattctgcttcctctctggtaaagacgacctctccctccgcctccttctccccgtaatatttctgatagagatccgtctgaaacgaagctccagcctcggcaatctgcccgagcgcctcgtttacctcggcaagcagttccttgttctgcctcccagtcataatatagaacggatcggaaccgaagcggcagatgatcttgtaatccgtcttgagtgcaagacttcccatggcaaccgcgtcaatctcgccgcgatcgagcgcaccaaaacatgcctcctgcgtgtcatagatgctctcctcgtaggaaaatcccttttcggcggcatagtccctgaattcctgattctggaagctgtccctaagcatacctacgcgcatgccgttataggcggcatagtcattgtagtagtaaatatcgttctctttactcacgtacagaacactcgtctccgccccgatggcatagtccgaaaaaagatactgcttctcccgctcttttgttcgctgcgcctggcagatcatatcgatctcaccggtctcaagtttttttaactgctgatcccagctgtcatactcgaattcatactcccagccggtatattctgcaattttgcgcagatattccacaccgtagcccgtgtaggttccgtccttttcttcagtgataaatccatcataatcgatatacccgactttgattacatgccttttctcctgatccgccactgccgccgtcacactcaaagcactgcacagcacacagcaaacaaagcagatcagcgccgccacgcgtctgtatcttccggtcactcttgttcctccctcataccatgcagccgctccacaaaggataccgcaaatttctgcacatccacgcctaccgcttcctcaaagctctctcccgtaacgatcgagttggagataatgcggattcccagaaacggtatgccatacgccaggcaaagctctgccggagctgcggattccatatcttctaccgcggtcttataccgctctcttagcagtgcgatccggtccagctggttgttccactcatccgccgagccgatcactcctctgcccacataaacatccgtctgtaccttcatcgccgcatccccaagcctctcatcacacgggaaatcgagtactttccttgtctgtccaagtgttttatcgaaaatttcaatcggcagcggctcaaaatcacactcatcgattccggctccctcgggggcatatttccggatcatggctcccatcggaaccacgcgctcccccaccacgatgtctccccgatggaatcgcgcatcatgacctccgccaatccccatgttaatcaccgcccacaggcagaactgtgtcatggcaatggcggttgccgccgccgcattcaccatcccctgataggtgcgcgagataacgaccggctccgcgtgcttccctaagaatcccgtataaaatttccagttgccatatgttatctcctccggttctccaagctgtccgatcagatactccgtctccgtgtccatcgctccctgaagcagaagcgccggttgttttttgaaatcgtaatttggcatgttttcctcatttctgtcttttcttctagcacattctcatttctgttgtatctactatacgttgttaaacttcccgatgtcaagggacgtatttttttcttgacggataccgctttctgttttaaggttttagtagatacagacaggaggatttttatatggaaaaaattgctagctttaccatagaccacatcaaattacagccgggcatctatgtgtccagaaaggatcatgtcggagcggaagtcatcactacgttcgatcttcgcatgacctcaccgaacgacgaaccggtcatgaacacggcggaagtgcacacaatcgagcatctgggtgctaccttcctgcggaatcacaaggacttctccgataagaccgtctactttggaccaatgggatgccgcaccggcttctatcttctccttgccggggattacgagtcgaaggacatcgttccgttaatgatcgaaatgtttgaatttatccgggattttcagggcgatgtacccggcgccgcaccaaaggactgtggaaactatctggatatgaatcttggcatggcgaattatcttgcgaatcgttatctggagaataccctgtatcacattgatgcagcgcatctcatctatccggaataaaaaatctgatcaaagaaaaagggtgtatcgtctcaatctctcaataaagactttacaccctttgttttttgtaatttgatttaaatatcgtccagggattctttgatcttatccatgaatcccttctttttcttaggcttctcctgcttatcggaagaacctgccccatcctgggcgcccgttcggtttaaggaatcacccgtcagcgcatcaaactgacgtaacgcctcctttgcgtctgcagaaagcccggtcggcgtctgtaccaccagatccacatagtggtcgccgcgaactgatttgttgcggagggacggcacgccttttcctttcaggcgaattcttgtgttcgtctgtgttcccggcttcacttcatacagcacgtcaccgtccaccgtatgaatacgaatctcgccgcccaatgctgcctgagcaaaagaaatctgtgcggtggaataaatattcatatcctgacgctgcagggtcggatgtctcgatacgacaacctccacgagcagatcgcctctcggtccgccgttgattcccggctcgcccttctcccggatacggacgctctgtccgttgtcgatacctgccggaatcgatacctgaatctttttcttgcttgcaatgtatccggtaccccggcaatccgggcacttgtctttgatgatctttccggatccaccacagtctgggcaggtctgcacattctgcaccgtaccaaagaaagactgctgtgtaaatacaacctttcccttaccaccgcacttcgggcaggtctccggtgtagtacccggctttgcacctgttccatggcaggaatggcactcatcctttaacaccatctcaatctctttctcacatccaaagattgcttcctcaaatgtgatgcggacactggttcttaagttggagcccttcataggaccatcatttgttcttcttctggaaccaccaccaaagaaatctccgaaaatgtctccaaaaatgtctcccatatccatgccggagaaatcgaatccgcccgctccaccaccggtgccgtcaaacgctgcatgaccaaactggtcatactgctttcttttttctgcatcggaaagcaccgcataggcttcctgtgcttccttgaacttttcttcacactctttatccccagggtgcatgtcgggatgatactttttggcaagagtacggaatgctttcttgatctcatcgtccgatgcggtcttgcttacgcccaagacctcataataatctctcttatccgccataacttttcctctattcctctctactgcacacagggtttccagatgtcaccatccagaaaccccatgttttatacactgcgttgaaatatcgtaacacactctggcttctttgtaaatgccgcagcttctgtcagattatacttccttgaagtccgcatctacaacatcgtcgtttgcagcgcctgtgcttcctgtgcttcctgcaccgcccatattgcccatatcaggacctgcgcctgctgcaccctgtgctgcctgtgtctgctcatacatctttgcaaataccttctgtgcactctgtgtcagcttctcctgcaaggattttaactctgtcacatccgcctctgtcatctcttctgcattctgatgtgcatccaggaatgacttcactgcattcatgtcgttctctacttccgacttatcggctgcatccaggtttgcgccaacctgatccagtgcctgctgtgtctggaatacgaaggaatctgcatcatttcttgcatcgattgcttcttttctcttcttatcctgtgcctcgtactcagctgcctctctgactgccttatcgatctcatcatcagacatattagaaccagctgtgattgtaatatgctgctctttgcctgttcccagatcctttgcggatacgtttacaataccgtttgcatcgatatcgaatgtaacctcgatctgcggtacaccacgacgtgctggcgggataccatccagacggaactggccaagggacttgttatctcttgcaaactgtctctcaccctgtacaacgttgatgtctacagcggtctggttgtctgctgcggtggagaagatctggctcttcttggtcgggatagtcgtatttctctcgatcagtcttgttgcaataccacccatggtctcgatggacagtgacagcggtgttacatccagaagtaaaatctcacccgcaccggcatcgcctgcaagcttaccaccctgaatggaagcaccgatggctacacactcatccgggtttaatgatttgctcggctctttgcctgtgagctgtcttaccttatcctgtacagccgggatacgtgtcgatccacctactaacaatacctgacccagatcagcgttggtcagtccggcatctctcattgcattctgaaccgggattgcggtcttctctaccagatcatgtgtcagttcgtcgaactttgctctggtcaggttcatatcaaaatgcttcggtccctcagcagttgctgtgatgaacggaaggttgatgttggttgtggttgcggaagaaagctctttctttgccttctcagctgcttcctttaatctctgaagtgccatcttatctgtggataagtctacgccctctgccttcttgaactcatcgatcatccactgtgtcactctgttatcgaagtcatcaccgccaaggtgtgtatcaccgtttgtagaaagtacctcgatgacaccatcaccgatctcgataatagatacatcgaatgtaccaccgccgagatcgtataccatgatcttctgctctttctcattgtcaagaccgtaagcaagtgctgctgctgtcggctcgttgatgatacgctttacatccagtcctgcgatcttacctgcatccttggttgcctgacgctgtgcgtcgttgaagtaagccggaaccgtgatgactgcttctgttactttctctccgaggtatccttccgcatctgcctttaacttctgcagaatcattgcggaaatctgctgcggagaatactgtttgtcatcgattgctaccttgtaatcggttcccatatgtctcttaatggaagagattgtcttctctgcgttggtgactgcctgacgctttgccggctcaccgacgagtctctcaccggtcttcgtaaatgctacgatagacggtgttgttcttgcaccttcctggttggcgataacggtaggttttccaccttccatcactgctacacagctgtttgttgttcctaaatcaattccgataatttttcccatgatagattcctcctcatcatattctaaaaacaaatttgttacttttgctgcatttatattaacgcggacatcttacgatgccggcacgtctgactgataaaacggctgctatgataccactgcaaccatgctgtggcgcacaacagaatccttatacatataacccttctgtaactcctgtgcgaccactccggaatcgtactcctcgctttccacctgcatcactgcattgtggaagttcggatcaaattcctgaccgactgcctcgatcggctttactccgcttgcatcaagctcggtaagcatctgtctgtatactttatccatcccgacgacaaacgcatcttctcgctgctcctccggtactgctgccagtcctctctcaaaattgtcaatcactggaaggatcttctcaatgatactttttgctcccatatcgtacatctgtgttttttctttctctgtgcgcttacggaagttgtcgaattctgccatctgacgttttaatttatcattcagttcctcgatctgttcgtcttttttatctttctttttcttaaagaatcccttcttctcatcggcaggcgcttcctggccgtcctctgcctcagattcctctgtctcttctgcctgctcgccggattcagctgcttctgtttcagtctctgtctcctccgcctcgcttacctcttctgcctgcttctctgcggcatctttttcaagatcctctaatacttcttccatcatttcttcttttttctctgccattccaatcctccatctatgtctccccttttggtctgtccaaaattccatcgagagaattcttcaataccttcaggttatccatgactttctcataatccattcgcttcggtcctacaataccgatagttccgcgaatcccttctcccaattcataggttgctgtaaccacgctgcagtccttcatcgtctgaatcgggctttcatttcctatataaacctgaatccctgtgctcttatcttccaacaggttctcagtgacaagtgatgcaagctgctgcttctcctcaaatgtggagatcagttcactcgctttttctgtggaatcacttaactccgggtatttgaacaggttcgttgtcccgctcgtatagatccggatatcctcatcctgtcccatcgtctctgccacggtatccagcacatcactgatgatgtcgctgtggattcccgcctgctccttcaacttggcgatcgtgccgagattgatatcctgcaaggcaagaccgttgagattcgagttcagcagaatatttaacttcagcatcgtctcattgtcgatcggctcggatactggaataatcttgttcttgaccagattgccctccgtgacaatcactgccagtatctgttcttcattcacattggaaagctgtatgaactttaccttgttgcggtggtagctcggtgccgacaccatcgtcgcatagttggtatttgccgccagcatctttgccacctgctgaagaacctgatctactttttccgtgtgttcaatgacaaacttcttcatgtcatcaacttcacggttcttctcttccatcagatgatctacataaaaccgataccccttatcggaaggaatacgtcctgcggaagtatgtggctgcaggatataacccagttcctccaggtctgccatctcgttgcggatagtcgcagaactcagattcagatctgtatactttgaaatggttctcgacccaaccggctcgcctgtctccagataattgcggatgatcgcatctaaaatttttattttacgttcatctaattccatctcgtccatcgctggtctcctgctgcttttcctgcagttcctcttgtcttattagcactcgttgctatggagtgctaacaccttacgtacttaagatagcaccaacctatttctttgtcaacaggatttttcataaaagttgtgttttatttgtgattttatagtttgtttataaatagcaaaaaatcctccggaggttccatgtcctccagaggattcccgcatcactttcttctattataatagaatacacatttctctccatctatatccgcccgtcaggcggaaaacttccgctaaaacggccggaaacagcaacagttgcagaggagatccagacagagcaggcttaagcaccagttccctgcgctcgcatacggtctgtcgtagtcacttcccatgctggtataccatgtgccgccatactgaagatgctgtaaaaactgccggtattccatattgctcggctccatctccaccgcacgctttgcgtgttccatcgcgttgatgttattgcccatgccctgattggcaatcgcgctgaaatagtaccagcgcgcccggcgttccccaaacggaattccgttcagcacattcaacgcctccacatagtgtctgcttgcaatataatttgcagccgcctgcatcttcggcgattcattctgaccgaatccatggctgccggcgtaactgtaaccgccggaattgctactgtagccgccgccataaccgtatccaccgccctgctgcttctccttcatgatctggtcatatgcctgctgtacttccttaaaatgctcctcagcctcatccctgttcggattgttcacattcgcatctggatggtattttctgctgagtgctctgtatgccttttttatctcttcatctgaggctccccgcgatacgccgagcacctgatatggatctgtcatatatgtgtaacctcgctatttgcgcgcttttttcttattcttctcttccgccttgcgttttttcagctgaagatactcgtattttgaccatacgccggaatacagcacattccgcagtatatccgcatgtaataaaatcggaaggcgctcaaacgacttggcgcactcggacatcatgctcgtgagcagcagacggcagagcgtatccatgtcatccgcactctcccgcatcgcatagacgagtggattgtactcctttttcctgcgatcctcatcgtaatcctcataggcatccataatgtagatgaactttcccatgtaaaagccaagtgtgcgcagctcttcctgccactcatcctctctccagcagaaaatctcacccagcatctctccggtcagacctgccaccacatcaaggttcgtctcgcctcttgcctccacctcgtctgtttttcgcatgaactcttccactgcgtgaacctggcgcggatacttctctatcacgcgcgcatagtccttatccagcatctttgcaaacgccttcttcgtataggctttctcgtccttccagtcgtcaatcagattatgataggctacaatcagattcatatccgccgcataatctgtcgcctcattgatccacacctgccgcttcctggtcggatgcagcgcgcaggtaatctcggaggattcattcgtaagctcatacaagcccgtcagaagaacgatcagaaatgtcatatcatagttgagcagcatctgtccttttgcaccacagttggatttgagtctctggcacagtccacagtaatatgcctgatatgccttccggttctcctctgtcatgatcttctgattgatatttatgtaaccgaacattccaagttctcctttgccctgccagatcagcttcttctgatgaattctctcctgcacttcgggcaggtaatacagattttgcctcttcccttcggcacccgcactctctgcctgcatccaggacacttgaaaaagcggtaggtatctctctgtgcgaagcgcttcttccactgatcccgcttcacaactgctttgtagcgcctgctcagataccgctgattctcctcgtaacgcttcgagacgttctttgaaaacatacggaaacaattataaatcatcagcgcaattccaaaccagtaaaaaacggaaagcaccggcagaagcccgctaaacatcgacacaaccagactcaccaataccacgatgttcaaggttctcccaagctcatccgctccataccgtccagtcataaaacgctgcagtttttctctcatatccattccttcctttccggatcatgagatcatgttaagccctgcaaaatagactgtcaaccttcctatcgtctttttagaaacattttagactttgattagatttcaggctgcctgtcaaaacaggcgcacctttctcctcatatcctccggatcttttgctcctgcgatcgccgtctcggacgtaatgcagctcttcatataaagattgtaaatcgcatcatccatctgcactctgccacgctccttctctgctccggcggacgtatccagctgctgtatccggttctccgcaatcagactgcgcaccccggcatccgccaccagaacctcataggcagccacgcgcccggcttcatcctgccgccgcagcagcttctgcgccatagcccccgccagtccctgcgccagactttccagaaggatctgcgaaccggatgtgctcccgccgcactgtaccagatggagcaatgccgccgtcacactgtcctccttctctgccagaatcacaaactgccctctcctgactgctgcaaacaaaagcccggcctcccgctcattcccgattccatccagaaggatcacatcggcatcctgctgcagcgccatcgcaagggcttcctccctggaagcgcagtccgctccgatctcccgctgcacaaccagtccccttccctgcggaaggatgtattctgtcgtatcctccacagagacaatgacctttgactgtgttgcggcaatctgtgcggcaagtgatgccaccgtcgtcgtcactccgcttcctctgcctcccgtgacaagaagcagcccgcgcccgtttttcacaagctccgtaatctcctccggtaacagaagtttctccggcatcggaaccccggccggatgcagtcttacggacatggcatctctcccctgctgtctgtatacggacacgcgcagacgcagcgctttggaaaatgaatagctgcataccagcgcgcctttcgtgcggtactcttccagctgatccccggacaagatctgctccgtcacctctgtaagatccgcatcctgccattctgcggcgtcctcctgccctgcggcagtcagttctccgtcaatccgaagcatcgccgttcttcccgggacaaggtgtacatccgatgcacctttgccatccgcatattccataagatcattaaaaagttttatgccgttcatagaaaaactccttcttattgcttcatagggaaatgcaatgcatccccgcagagcgttttttatttctaggaaggttctactttcacacattaatgtatcacggtatttcctatgaaataaaaagagccgctgcgcgactctcagatacttctatgtgacaatgataagcagaacgataagccgggttatgtctaaaccgtggcaagccacggtcggaatgatcatctatctaggatgactgttgccagccacctcaagcaacctacctaaagctggcgggccgcgtcaacgcttttgttcggtcttgcttcggatggggtttacatatgcccgctctgttaccagcgcggcggtagtctcttacactgcccttccacccttaccgtattccggcattaccggaaccggcggtatatttctgttgcactatccttggagtcgcctccaccggacgttatccggcatcctgccctgtgaagcccggactttcctcaccccagcaatgctgggccgcgatcatttgttctacttatcaccgcaactattgcttattataatgtgctttccgcaaaatgtcaaagcaatcctatacattgaagcaggaaccgccgatgaattcgcggataatcgaattctggctgataccgtcgctcggcatcggaaggaaataatccagaaacttgagcaggcgctttgcctccagatattccggacaatccttgtcaatggcaaacagcagcggctcggcatacatctttaacactgccagttcatagatcagcgccgagttaaacatcacgtccgccccctcctggaacgggaaaatgtagcgctcctcaccgcggcgcaccgaatcccacatggcaatggtctcctttgccgaagtccctctcgtgcgcgcatctctcacaatccggcggatcattctgccgtccgttgttggcaggcagttgtgctcgtcgatgttgagctgggtcagcgcactgatgtagattttgaacttgctttccaccgggagagagcaggacagcctgtcgttgagtccgtggattccctcgatgaccagtatgtcctcttttccgagctgcatgtagcgatccttgtattcccgcttgccggtcttaaaattgaagaccggaagattgacacgcctgcccgcaagcagttcattcatgtcgtggttaaacagctccacatccagcgcttccagacattccagatcgagttccccgttctcgtcgcgcggacactgatccctgttcacataataatcatcgagagggaacggatgcggctttaatcccttcgcggcaagctggatagaaaggcggtgtgaaaaggtggtctttccggaggaagacggtccggcaatcatgataaactttttgccgcccgactttacgatcgtatctgccagatgtccgatccgctcctcaaacagcgcctcctgtgtcagaataatttcctgcatgcgcccttccgcaatcgcgtcattaagcgcgccgatcgtgccgatctctaacatgcgcccccactcacgcgaagccttcagcgtgtggaacagcttcccggaaggtgcaaactctgccacttcccttgtgttctcattcgggaacagaagtacaaatccatcctcatacgtcacaatatcgtagtagcggagatagcccgtagacggcaccataaatccgtaaaaatagtccttatagtgatcgagtacatagatattgaccctggagctgcggcggtatttaaaaagcttttccttatcctccatcccgaggtcatggaacagtgcaatcgcatcatctgtgttcatgctgcgcttctcaatctcgatatcctccgttacaagacggtacatctcctttttcagcgctatggcgcgctcttcgtccaccgcaatcacgcgctcctgtccgtccgccttttcacgcagctcgcagtaatatccctggccgatggaataaagcacacggacgctgatatgttcacttccccagagattgtagaccgccttctgcatcagaagcgtgacgcttctgcgatatgtcttttttcccgtcttatcggccgtcgtcacaaacgaaagcattccgtcccgctgtgcagtcttatttaattcccgcagccggttattatacaccacaagcacgatgtcatccggatatttttcctggtattcctgcgaaattgcaaggaaactggttcccgccggatattgtcttacttccccttcaattgtcaagctgaccatatctttccccatacaaacctctccccctctgccttttcttcaaggcttttttcattcataatacgcaagcgccctggcattctgcgcgaggatttgttttacgtcgtcaatccgggctgcaatctgctccgtcgccggctgaccggatagctgtgttaaaatatcctgctggatctgcgcttcccagcggagatacgccagaagcaccggatgtttttctgtaagaagctgctttccatagcggaattccagttcctgttcttctgtaaagctgtctgcatgagagactgcggaagcatcaaagtgaacgcgcatcatggggtaatattttccatcctccatgaccatctcttctctctctgtgacataaccgttctccatcagaaaacgccgcaccttcggaagctctgactgcggctgcaaaaccagcccatgtgcctgctcacagatgactctcccgctctccagaatatgtttgaccagtccgccgcccatccccgcaatcaggatggtgtccgcctcacccggctttagcgccgcaacgccgtccgacagacgagtctgtatgtagtcttccatgccgtacatccggatgtgttccctggcacgctccagcggtcccgtccggatatccatcgcaatcgcactggggatgtgctttcgttccaccagataaatcggtacatacccgtgatcggttcccacatccgccagccgctctccctctccgatgagtcctgccgccgttcttaaacgttctgatatttttaccatagattactccagataatcctttaatttgcggcttctgctcggatgacgcagcttgcgcagcgccttcgcctcgatctgacggatacgctcacgtgtgacattgaactcttttccgacttcctcaagtgtcctcgcacgtccgtcctccagtccaaaacgcagtgtcagcaccttctgctcacgctctgtcagcgttccgagcacttcctccaactgttcttttaacagggtaaatgccgctgcatccgccggtaccggaacgttgtcgtcctggataaaatcaccgagatggctgtcctcctcctcaccgatcggagtctctaaggataccggctcctgcgaaatctttaagatctcacgcacacgctccaccggcatgttcatctccgcagcgatctcctctggagtaggttcgcgtcccagctcctgcagtaactgtctgctgacacggatcagcttgttgatcgtctcgaccatatgcaccggaatacggatggttctcgcctgatctgcaatggctctcgtgattgcctgacggatccaccatgtcgcgtaggtggagaacttatatcccttgcggtaatcaaacttttccaccgccttgatcagtcctaaatttccctcctgaatcagatccagaaacaacattccacgaccgacatagcgctttgcaatgctgacaaccagacgaagattggcctctgccagtctctttttcgcctcctgatcgccgagttccatacgctttgccagctcaatctcctcctccgcggacagaagcggcacttttccgatctcttttaaatacatacgcaccggatcttcaatggagacaccgtccggaacggaaagatcaatcttctcgacctcaatctcatcctcatcatcgacgtcaagaagcatctcatcgtcaacgtcgtcatccgtaatacgaagcacgtcgatgttgtttgcctcaaggaaatcaagaatcttctcaaactgctctgcatccagctgcatgtcggaaaagaagtcgctgatctcctgatactccagcatgtttttcttcttttttgccagcgcaagcagttctcttaactttatctggaacttctcctgggcgcttgccaccccgttctctgctcccgcatcggcagttttcgcagcagagttctccttgttttctcccagaacttccttattgtcggtgttttctttcttttttgccattttcgcttcatcctctcatagttcgttactattttgtccttaaatgcagattttcatccacattcctgcttctttgcccgctctcattcctccagcggaatatgaaccgttcccggcagctcattcttttcttttgccagagccgccatctcctgaacgtcaaacgtgtttgccagcttatgattgatgctgttctcccgcacgcggatcacggtctcgcgcagcgctttttcgcgttcctccctggtatccacccggtggattgtcgcgtttaagattcccgctgcctcccgctgctgctcctcatcctcgtaggtgctgatgatccgcgcaggattgactgtcccgtccttctcatactgttcaaacagcatttttgccacactgtggcagatcgggtccgtaaaatcatctgcaccaacatatctttgcacctttggaaacaacgccggactgttcgtcagccacgtcagcagaagcttctgcgactgcaccatgccgtcctcgcgctttttcgcactctttttgtattctgtgcgcgcaccgtcctgtgcgtccgcgacgctctgcggcgccctgcctcctccggcaagtccggcctttaatccctgctggttgaccagccttctcaaatcgtccggcgagatcatgtatttggctgcaaccgcctcaatataattatcgcgctctaacttctccgtaaatccgcaaagcatcttcgcgaccgcattgtaaaaggccgtcttgccctccggatcgtgcatgtcgtgctgctgctcttccatgcgcacctcaaacagaaaactgttctccgcctggtcgatgcgctcctgatacgcctccgcaccaagcgccttgataaactcatcgggatccttatacggcttcatgttgatgatcttggtcgtgattccgacttcttttaaaatcgggatggccctgagcgccgccttgatccccgccccgtcgctgtcatacgtcagatagacttccttggtatagcgcttgagcagattggcatgaccgcttgtgagcgccgtaccgagcgacgccacggcattgtcaaatcctgcctgatgcagtgcaatcacatccatatatccctcgcacaagagcagctgcggcttttttgtcgcccgtgcgaaattgagtccgtaaagattgcggctcttgtcgaatatcttcgtctcgggggaattgagatactttggctctccatctcccatgacgcgcccgccaaatccgatcaccttattgtgcacatccatgatcggaaacatggcacggttccagaacttatcatgtccgccccgcacctcatcgatcgtgacaagaccggaatcctttagaatctcgtcgtcatagcccttcgaccgcagataccggtacagatcatcgctgtactgatccgaatatcccagcccgaacttgtggatcgtctcatcggacagcgccctctttttaaaataatcaagcgcacgtttcccgcgttccccgcgaagcagcacaaaaaaatactttgccgcctccttgttgatctccaaaagacgtgccctccgatccgcctcctgccgctgcgccgccgtatattcctgcttcgggaggtcgacgcccacccgctcggcaagcgcttccatcgcttccccgaacgtgtaattctcgtactgcatcaggaaggtaaaaacattgcctcccgcgtggcagccaaaacaatagtacatctgtttattgggagagaccgaaaaagaaccggtcttctcattatggaaagggcacagcccgaagtaggtactgcccttttttgacagccgcacatactgcgaaatgacgtccacgatatcgttgcgcgaacgcacttcttctatcaattcatccgaataacgcggcatcttccgctcctttctttccgctttttatttccattctaatagccgtccacctgccaggccctgggacgcctcaggcatgacacagtcttaatagccgtccacctgccaggcctgaggcaaaaagtactccgaaaacttggtgatggcatactgatccgtcattcctgcgatgtagtccgcgaccacgcgctccgcgctctcgccctcgtccatcatgcgcagatattttgccgggagctgatccagatgctccttgtaaaagtaaaagagctgctcgatcatcgccttcgccttgacttcctctccctttgccacagggttcttgtagacgttctcaaacatgaacttgcgcagatcgatcatcgcctcctcgatctccggcgacatcatgatgtcatccttctccctgctgttcatgataatgttatgtatcagcgtattgaggcgctgcttggtggaaaaaccaagggtctttctgagttcaagcggaatatcgtcctccgttaagaccagcgcacggatcgcatcgtcaatatcgtggttgatataggcaatcttatccgaaaaacgcacaatctttccctcgagcgtatgcggcatcagtctggactgatggttcaaaataccgtcccgcacttcccatgtgagattcagcccctttccatccttctccagcttctccacgatacgcacactctgttcgttgtgccggaatccattctcgcagagcccgtttaacacgaactcgccggcatgtccaaacggcgtatgcccgatatcgtgtccgagcgcaatcgcctcgaccagatcctcattgaggcgcagtgcctttgcgatcgttctggcattctgcgatacctcgagtgtatgggacagcctcgtccggtaatgatcgcccttcggcgtcagaaacacctgcgttttgttcttgagacgccggaacgccttgctgtgcaggatgcggtctctgtcacgctgaaataccggtctgatatcacacggctcctcatacacatctctgcccttagaatgaatgctgagcgtggcgtacggacttaaggtctcgcactccattctctctatttcttcccgtatcgacatgtattatctcctctttttcgtcacgcactacgcagtgactccatatatataattctgcgtccggagtggatttcctctatttttttcgacacagtttgaaaaaatcatgtttccttgcgctaaaaatgctatactataaccaccaaatgaacaaggagtgtggtaccatggttttatttctgctcatcatccttattatgatttcggtatattggagaccaatgtggggaattctaagaggtctgctgctcggctttctttttttaatcgggggcagttctctgaacatcccggttccggtttcgtttgtggtatttgttctctactgccagctgggcaccccctggcttcgcaagacaaactaccggcagacaaaagcgacaagaacatttcacgaatcgacaaccaccgacgcggatcactccacgtacaccacggagcagtactattatgcctatgaggtggacggcacggattataccaacgtgcatagcatctatccgtataataagaagctgcatgcggaagccaaaagcgcagaatgtgaaattttctaccatccgaaaaagccgaagaagatgttctgcccggaagatatcgcaaaagattactacacgatatggattctccggttcctgatcggcggcactatcattgcaacagatttttatttttaatttattataaaatgagaaaggcaggtcaataagcatgaaaataacaatcgcaagacagtgtggaagcggcgggcacaaagtcgccgacattctgtccgaaaaactgggtatggagatttttgacaaaaaaagatttatcgaagagtctaaaagaagaaacgtctatgatgaaaacgcaaattttctgaacgagaaaccgatcgacagttttctttacagtcttatcatgagctacggttccaaaaatccgcgtgaacgatatatccgttttgtaaaggatgtcacggagcaggaatcctgtattatcatcggcagatgcgcaaacataatctacaaggatgacccggactgtgtgtccgtttatctccacgccgatccggacatacggaaaaagagaatccaggagcgcgaccacgtatctgaaaaagaggctgcggagacattgcgggaagtagatgaaaagcgttctgcatttcaggaacagtgcacggcaacccgctggggcgacggcaacgaatatgacctttgtattgatacagggaaaatcggtatcgagaaagctgccgaattaattttgcagtatatagaatacaggaaatgaaaaaacgggaagccttcactctcaaggcttcccgcaaataaaaaatgcaggagatgggacttgaacccacacgatattgctaccacaggcacctgaagcctgcgcgtctgccaattccgccactcctgcataatctccacgaatatttgtgatgtaatgcggaagatgggacttgaacccacacgttcgcaatgaacacaagatccttagtcttgctcgtctgccagttccgacacttccgcatttcggtcactcatcgtgacgacttgataataataacaaacgtattttaaaatgtcaatgcttttttcaaaaaattttaaataaattgttcaaacaattcgtgcaactacagatatttctcgtcaaactcctctttatgcagcggctttccaaagtaaaatccctgaatcaactggattttcgtctgcttgagcgcatcaacctgttctttcgtctcgacgccctccacacagacatgaacgccgatcgtctgggcaagttccgccaccattttcacgaaggcggcggaaaattcatccttcccgatgtcaatgataaaacagcggtcaatcttgatgacgtcgatcggcatttcccggatatgattaagtgaggaataccccgtcccgaaatcatccagcgccacacgcacgccaagtgcgcgaatctcggaaagaatcttcttcatccggctcatatcgttgatcgccagcccctccgtgacctccagggtcagattctccggtacaatccccgtccgtttgatgaccgagtgcacctgctctacaatgtcattctgcagcagctgcaccacggagagattgacatttaccttgtaatccggatgccccatatcgttccagtatttgcaccgcttgcacgcctcctcgaggacatacgcaccgatcgggttaatcagccccagatactccgccagcggtataaaatccgtcggagcaatcaatcccagttccccggaattccagcggatcaacgcctccgcacccacgcacggattggattccctggtcacatccacgatcggctgatagaccacctcaaactcggaaaatgcattgttggtcgcattgcgcatatttttttccatatcgaggcggcggaacgatgtggactccacgttctcatcgtagaactccacacggttcttgccggaacattttgcggcgtaaagcgcaatatccgccttcttgatcagctcctccaccgtgtcgccctctgtcgggaaacgcacaacgcccatactcatcgtacagtagtaatccgcccccttaagcatccacggcttggaaaacagcgtgcggatgtcgttcagaatcttctgcagcatcatgatctgccgatgtgcaagaataatgataaactcatctccgcccatgcggtaacagttattttccacacccggaatccgacgcaggctgtccgatatattttttaacaggatatccccgtactggtgtcccagtccgtcgttgatatgcttaaaatcatcgagatcgatgtagagcagcgctccttcgccgccgaactcctttgtctgttcaatgcagtgcgcaagatcctgctcaaaccgcatacggttgtaaagcccggtcaaaaaatcgttgtttgcctgccgttcgatcttctgctgatacagctttttgtccgtcacctcatagatggtatacaaaaatacacttcttccgtcgacccagtggattcctgtgcggtgatagtcaaaccagcgtttttcctgctccagatagatctcgcggaagcagtccgtatcaatgccgcccgattcttcccgccagcagttctccaacatgtccggcgcggcatcgtccggcagaaatgcgcgcagccgctggttgctgtagagaatccttccactgaccggatccttcacatagattccgcagcccacgttctctaaaatcgcctcaagggacgcatacgaactcgccagcgaattttttgcaatacgcttcagaagaatactctgaataatccgtctgacatcgttgacgaacttgacgtccgtcacttcccagttccgctcctcgtgttcttccaaaaagcacaggtacatctccgccctggtattgacctcgaccggcagaaaaatgcctgccaaaagcccgtgcgcatcaaaaaactgccggaacacctccggcatcatactgtttgaagaaatcatatacggttttccgttaaaaaagggcatcttctcacgcgacacgccggaccattccccacgcactgagtccattccgggcgccgcatattcacagatcatctcgatcttcgagtgctctttgttctcttttaagagcgcaccgcgcgaaatctccatgtacgcgcagcattcccgcagaatgtcgtgcacgatctcctcaaagctgttttccgactctaacatctttacgatggaagtcataacctcattcctgtgaagttccgcttccatctgcgtctcggactcgcggctctttagcaccgcctcctgcgccatcagttcttccatcttcacagcgaacatctgcttggacaaggtctccagaaattccagtgacttatcataccgttccggcgtcgtgcgcatgacataggacggaacatccgcgtcttcccgctccatgattccaatgacgatccagattgccgccgtcttcccgccgatcttgatggacacgccgcacattttcaccagatcatttccacaatcctcttcgagcacactttcgattccgtcatctaaaagccggttcataagcgtcatatgccgttccactccggtcagcccgtgaatgtacgccagttcctccttagaaccatatgcctttgtgacaactccgtgcgttctgctcagacacaccagatacacattattagcatcgcaaaaccgatcctgcagattctgcatcaatgtcgcatctaacaatcccagatcggtatcctgcgacgcttcctgattcatcccccttgaaagtgccatatcttcctcatcctttatactgaattacaaatagataaaactgatccttttcccggatacactgctcggcaagcagccggtaatcgcttcttatgcgaagctgttttctgataaatccctgctcattggaatagagcacaagaattccgtccgcttttaaaagtccggctgatttttcaaaaaatctgctgtaaaaagcgtccgtctcttcctttgactttcttccccggacaggcatattggtgatgatctcatcaaatagatatgcatgtgtaaaatcaaaataatcacggttgataaaattgattttctcccccgcatatgatgcattctccctcgctccccggattgcctcgccaaagatatcaattccgtatttttcccgcgcagggacacggatatcccgctcgatcaacatcgtgccgacaccgcagaacggatcgagaatctgcgcattttcttttaaatacggctctgccagcgccacaagcattgccgccgtcgccggatgaatcgaagctgccaccgcatttttgcggtagacaaagcgtccatgcgcaatcgtaagaagtttcagaaagcaggcgtaaccgccgtctcttttctccagaagccgcagttcaatctcataatccgatggtgcattcacaagcatcctgccggacagccgctccagctccgcggaaaaccgtctggcaaacgtgctctttttgtctaacggcatgtggctctttatttccagtctgaaataaaacggcgtcgtctcccggtgcgcctgtgtaaggagctcccgcagattggaatcccagaccgcctccgcggctcctaaggcatcttccggcaccggctgcgccgtgcgcaccggaaacaataactcgcggtaagtccttatcgacgcaaacgggcggacgtccttcgcatgaaccagcacaccgagcgggtgcagtttctcactgcgtctgaccgatgcggacaccgcttttacctcctcaagcgtcacgccgcgctgctcccggtttgtcgcgagcagaaaatcctgcggctctgtgaatcccacaaacgtgtgacgggtaattccctccgccgccgtaatgatacgttccagttcccgcagttcctcattcacatgctttttctcattctcgggaatctcccgcgccaaaagtgcatccctgtgttcttttaacgcttccagatacggggatacctccatccctgacaaagccgtgagatacgcgctccttacgaacagcgtctgctctctctcgtatgcatgaaaaagagaacctgccgtctgtaaaagcccgagacttccaagcagaagcgccgcatttttgcgcaccttcggctcatcgctctccagcagtcctgtgagcagtgccccgtctcccaccagagacagcagggtttcccttgcctgtgggtccttgcactcgcttcgcagcagactcaagttctctcttatattctgattgttctgtaattctttataatattcgtgaatcataccgtatacctactacccttgatactaggtattctacgatatttcctcatttttggcaataccattcacgtcaatgtaggtcagcaggtcctgcttgaacaaaagccacgcatcctcatgctccacatagtatttcgggcacattttccccgtcacatcataatgacggatcacatcatccgtagtcaggtcatagcgtcccatcagccaggcggtaagctctatcagcgactggtaggtcgcatcggtaaattctcccgtctcatccggaatgcagcactcaatggctatcgtgtcttcattccggtcattcgacgcgtaggcaatctcgttgcacggaatgcactgcacaatctccccgtccatgccgatgacaaaatgactgctggcatacgtctcccccgtgtctttcagattctcaaaatagctgcggttctgctccgctgtcgtgcccggattcgcagtatagtggatcacgatgccgttcacctgggaaagcgccgttcccggtcgcgaatattcgttgtaatccagcagttctacctgatagtccggcgcctgtgccacatactttacctcgtacgccatcaccggcttttcttcatatagaagctttttgatctgtcgtgtgccaaaccagaccgccagcaccaaaagcagcggaatgccgatcaaaagcactatgcgcagccggcgtcttctccgaagccttttgcgccgtctacgccttttctcctcatacctacgccgttcttctcgcctgtatttctcttcctgttcctctcgcattgctccatcttcccatctgtccgttcattctgtcgtgctctctctgcggttccacgcgcgcctcttttttcattatgcacaattattttcgtgattttttacaaaatttttactatctttttgttgctttcttctaaaacaagtgctatactctgtcaaggaaaaagaaaggaggcgtatcacgatgaaatataccatagatccaactatgacttacagcgaagcagttctcttttatgaagaatatctcactgctgccaaggctgctgggaaaaagccggtatctttcctgcactttatcacaggtcgttactagaaggcttttcccttcttttttatcttacatcagatgagaatttctgtgttttaaatttgtcttaattttaatcctccgaaaaccgtgtatttacaacattttctagtatttgttactaacccgtcactaaataatatctaaaaacgacatgtttcccttactcataatatcaatattttaagcatggatatatggataacctgcattccagcatggataagctatggacaaagtattgataaatcatggaaaagcaaaaacacctttcccacaatttaccaaccacttttcccacaagcttctccacactttcatataaaacaggttccccacatacccacactttctacaatttttactgatcccttattctttccaataaaaaaagaccttccaacaaggaaagtcttttcttttctactactctgcagccacgatccgccagttatcacccttttccaacgttaacgtatattccgatatttccgtcactttcgcaacctggtctaaatatttcacataaacatgtgccatgatctgatcatcttctttataataagtagcatcatacagcccatcataaacataatccgcaccgatcacgtccatcgttccaggtacggcataataagccagttctttctccgttgccgttggatacattccaaaaaaagtattcaagaaatcttcaatctgcaacatcgacgcactatctacagttccatccgtctgatactccttaccattataatcagcttttcccggcacgccgcaggacgtcggacttgtcactacaaccattccgccagcttcatccacatatacctcaatttcaaaataactctgcctagttgtatttgtcgtaacgctcccatcttcatttctaacggtttcggtcgaaagtgtcaccgcatcaccatacgatgtctttacctctgcatctacgtctgcatcagcagaatccgataattccgttcccaactccggctgctctgtcacatcttccgccgtctcgccggtctgtgttccttcaaaatcatctaccacgaccgtactactatcaccttcttccatctgttgcgacgtcgcaacaaccggaagctccttcttactgatcgatgcagtctcatccgaccctgtctctgtcaaaagctgcttgaccatataacgcacacgatacgcattnnnnnnnnnnttgagacgacgtcggacaatctgtaccaataaccataccatttaacccggccaatgcatctgacatataagacttcaacagctcctgtctctcacttctcgcattctgatctgtagcccacgcatgatatatatacgcaaaccgctccacaaaattctcaagctcattcgtgtcctgcacctttgcttctaccaccatccgttcatgcaccgtatttgtgtcaacagcagtaaaatttttgtagataccgaaagctaagctggcaatcataagtccccacaatatcctaaccgctcttttatttgtgccaacccgcaacactggcagctccgcatcaccgctgtccaccctttcctgatgcttcttttcacgatacacttttaccttctcaagcacaactttccatccggaatttttgctcccactctcttctctcactactttttctttattttttcgcattaagctacctccttattttattcccgatatcttccacagcatacaaaatgctgccgccaatatcgccccgtaagatctgcatatccaatcggattaccggcatgaaacattttattatcgaggatgtacgtgaaatcttaaatacactatgcaaatataaaaatgtagaaataattgcaggagcagtttgtgtagatcacgtgcatttaagtgtcgcaataccaccgaaattaagtgtctcagattttatgggatatttaaagggtaaaaacaccctaatgctatacgatcgtcacccagagttgcagagtaagtgggataaagcattttgggcaagaggatattatgtggaaacaatcggtaatatcacagacgaggcaattgcagcaagttctgcctttgtattctcatcaaaatacgggtttgtgcaccactctttgtaagtctccatgtaactcatgctttttccctcttttctttaatctttaatccattgtgcccagttcttccggtactcttccggcgtcatattttcattctcccggaacagctggtagaacaaatcttcattgccaatcccggattctgtgatcacctcactcattggctggatcgtaaaacgaagcaattcttttgccgcattaaacctgcggtttaaaatataatcccgcacactgatgccgtagctgccaaggaacttctgctctaacaggctctgctccataccaaaacgatctgtcagcaatgtatagatacctgcctctgcaaaatttgcattaataaactcacgaacctcctccatggtatctttgccggtcgtctcctgcaaacatcccgtaaccagctgcgtcaacatactgtgaatcgccagttccgacgcattttcctttacgccttcaagaatcttcccgatcagatctgcaacatcctctttctcactcgtcttaaaaacaggcaccgcattttttttatgaaacagctcatagaactccgctgcacagttcccattaaaatgaacccacgccagcttccacggctcatcctcgctgctgacatgttcaaaagccttgtgacaatcgatccacacgcactcatccttatgcagttcaatcgtctgtccttccgtggaaatgcttccctttcccgctaccacttcaaaaatcagataagaatccagattctccctcctgcacacatgcggtacgaggctttccagtcttcctacctcctgcacatagagcaaatgatttttggcaaacattccaggtgtgtgaagcatacggtctgactttgtaaccccttccgaagaaaacatcttttccatccgctcaatctcctccatcacgctatactctctcccgccagtaatccagaatttcctgaatcgtctgctccagcggaatctgcggtttccatccggtcgccgcgtttaatttggtaatatccgcctcaatgatcggaacgtcgaccggccggatcttgttcgggtcaatctccacccggatctcctttgttgaaagcgagataatcagatccagaatctcccggatctcgtgagcgtgtccgctgccgacattgtaagtctcacctgcagttccgctctgtaccagaagcgcatatgcacgcacaacatctcgtacatccgtaaaatcccgctttgccgccagatttccgacatacatcaccggttctttctttcccgcctcgatctccgctacctgcttgcagaaatccgagatgacaaagatcggtgactgacatggtccgatgtgattgaatgcccggaccatcatcagctgcatatcatacgcctgcgtatagatgctggcgatcatattctggcagaccttcgttgccgcatagatattgcccggtcgaaggtagttgtcctctttgatcggcgtctccccttcccggatatgcccgtactcttcaccggatccgatcagaagtacgcgcggtttgtaaaaaagctcccgcaccgcatccatcagattcacgcttcccttgacattgatgtcaatcgtaagccccggattcttccatgctacactgaccgaactctgtgccgccagatgaaaaatataatccgggcgcacctcgtacagcaatgcaacgatctcatccttattcaaaatatttaagtcatgaatcgccactcccggtatctccaactgttcatgcgccagctttgtcgcatgaacctccattccatgatgatcttttacctcacgtgcaagataacttccaacaaaacctgccgcacctacaatcaatgctttgctcatattgtcattcccttttacttatagatgataactttctaccatatttgcaaattcctgtgaatttgcaaacccccagaacacctgtgtcctgtccatcataccagagttcagtgcatttgtccaatcgcttattcccgcatcatctccctctctgtcaaagcatccgcggtacagcatttttacatattcggtattcgacaaattcttattactgcactctgtggaaaagacaaatccataagcaatctcctgcatggactgcgtgtgatggttgatcgcttcacaccagtggttcaaaccgtccgtatcataattcctgcttaaaaactgtgtataatttctggcgacaaaacttgtaacattatagttctggtcgcgttcttccgtcaatgagacatcgcccttctgaatctcatacatattgcacagctgctggaattcctctgaattgataaactggcggaacacataaagtctggaggttccgttttccagtgtcttgacccagcccgcttttccgtccgaatccgatgcacgtcccatgaggctcagatacagatgctccacgtaatcggcattgttataattatgattctgaaactcctcgctgaataaaaagccgtatgccacttccgcacccgttcttccgtttgtcagctcctgcgcccaataatccagttcgctctgtgctgccgatctgccgagtgcattttcatataaaagtgatgcaaaccgctgcttgccggtcagcgtcgttcctgtgttgccgctgtttccgttgtccgtacctgtgtttccgccattgttactgtcattcgatccgctgtttccacctgtatttccgccattgttactgtcattcgatccgctgtttccattgtctccaccgttgttttccggtgtttttacggttacgctgcaggtcagtttctgattgtcataagatgcactcagcgttgcattcgtccagctctcactggaaagttcatacgccacgagacggtagatcacattgacaacactctccggcagatcactattcaccgcaagtgtaaagctggtctcccctgctgcaattttctgacggatcttctcagcaaatggatccgaccactgatgtatctccccggtcttaataaaataattctcttccagagagttgcactcatatccttctaccggctgtgtatggtcactgtgtaccagcttcatgatatcgtcattcaatccaaaatacagatgctcataaaacgttcctttgtaggacgctcccatatcatcccaggtgctgtcaatctgataccattttccatccagctgcgccgctgtccacacatgtccatttccggcgatccgtcccgttggaataccgaccttatttaaaagcatcacataggctctgtgatatgactcacaggttccctttccgcgcgccagaacgccctctgccgcacaatagctgtacgtatagtcgtaatccgcgtgatctaaaatccagtcatgcagccagaccgccttatcaaaatcggtcgagcagctcttctcacattcgcccgcaacatttgccacgagttcttccaccgatggataattcggatcgttaattacgatggggtactccagcagccctgtcgtcttggtctggtatggtgtcgatcccatatccatgacaccaaaccggatataatacgtacctgacgcataaaaggtgaatttgaactcatcgctatctccgtagacactgtttgacccatagctgatatcatagacaaaattctgctgcgcatccgtcagcgaagcaatccggtatttgtaagtaccgctcccgccggtcgccagaagcttaaatgtcacctcttccccgcacttgatgtctgatggataagataccgttaaattcagcgtgtctgccgcttttaattcctcagataccacttcctctgccattaccggcatacggtttccgagtgccagcaccatagcgcacaatactgtgccaattatcattcttatttttctcattttgtacctcaaaagggaattccgcccggaattcccccctttctttttttattgtttaccagtctccaagaaaattctggcagtaattcgtaccgtaagctccccctgtcgcatagccggtcgcaagatagtcatacgactcacttaaaatattggctctgtgtcccgtagaattcatccagccgtccaccacagcagatgctccgtagtatcctgccgcaatattttctccagcagcacggtaatccagccccgcctcatcatagagtgaaaagcagcttgacccattcggacgtgtgtgcgaaaaatagttcacaatctccccggcacgtacctgtgccacctgctcccacagatcctctctggtcataagcttttccagaccattattctgacgctgctcgttgcaaagcgccagaatctgcacattcatctgccatgcatctgtagcatccggcgtctcaaccgcatttccaatattgattcctgacgctgcacagcgtcttgcaaactctgtactgaacaaaaatccgttaaacacatattccctggtattggtatagttcagcttgtctacccagtctgtaaggcctgcatcatccggttcgcggtccatcatcgtgtgatacagcatcgttgcaaactctgtgttagacgtatgcttctgcttatattctgtgctgaatataaaaccatacgccacctggctgccctcggcaccgttagcaagctgtgtactccagtctgcaagccctgcctcatcaggctcgcgctccagacagatgcggtacaatctggtcacgaagtctgtaatcgtatcattgtcagcaccgcaccaggagcagttgccgagaatcggaatactgatgtcgctccagtcgccgcttccactctcaataccataggaagcacaaagcgcagaaaattcttccgaattcacaaagccggtcatgaccgctcctctggtctgcccttctgccagacgattcatccagtccgcctttccggcttcatctgccgtgcgtccgaaaaacgcctgatacatggcgtccacatagcagctgttgcagaggttcatattgcggaattccgtactgaacacaaatccgtacgccacatcagcgcctcttgcctctccagtctgcagacggttcacccagtctgccctgccttcctcatccgctgcacggccaaggcacacctggtacatccggtccacaaatgcggtgacattatcctccgcccgcaccggaacggtcttctccgtcagaagaccggctcctgtaatcatgacaaaagcagcaataaaaaccgccagcgatcttcgtatctttttcattcagttcctccctatctctggttgacgcagattgcaaactctgtcatcccactttagtctctcgttattccatactttttgcacagattattgaattcttcactgccgacaaatccgttaaatacatcttccctgctgtatccctgcgtctgcatgcggcttacccagtctgccttgccgcccgcatctgcactccggtcaaaaaatgcacggtacagatactccacataatcattgtcattcagattcttattcttaaactcctgggagaaaataaatccctgcgctactgaaccgccgctcttcgtgtgatcccacagtccgttcgtccagtcgtttaatccgtccgtatccggattgcggtccaggcagatattataaagtctggtcacaaatgccgtcacaccgtctgtggcaccgcagaccgtacatgctcctctcggaactgttccgtactgtggaaccgcaataccgtctcccctcgtaataccgtactgggtacacagattgttaaactcttcgctctgcgaaaatccgttgaatacttcctccctggtcgttcctgtctcaagtctgccgacccagtcatccagaccgccctggtcatattcacgtcccatgaacgcgcgatagagctgctttacatagtcggtgttgcagtaattgtaattctggaattcctggctaaacacgaatccgtatgacacctccacaccggatgcctgtccggatgacaatctgttcacccagtcatttaagcccgcatcatccggttcacggtttaagcagacctgatacagccgggttacaaactgttcaatcggatcttccgtaatcacccggttgctttccggcacgacctcgaccacattcttatttacccacattgccggacggacaccgccgatcacattcgccactgccataccgtcgtagcggagcgaacctgtgtaatgtacatacatggcatcatatgtatagatgcccggagtccgcagccaccagtaagagctctgtgtatttgtattgcgaagcgccgggtcgccgtttctgctaagagcatactctgtgcagttcgccattcgcttgccgtccgtattcagatagttggcagcctccgatgcactgagcaaaaagatcttatcaccggtcgccgatccgccggatgttccgaatacggtattcgactcaccggataccgatgttgtgtaaatcccggacttctgtccatcgctaaacgccgcattatagaaggaatcattcagccaggtacggatactgctgttcgcccatgtaaccgttgtctgcaggttcggataataccgctggaaatccaggaccttcttgctgatcaccagcgccttatcaccctgaatatccagtaccgtccactcaatggtctcagcgccgttggaagcattgttatcctgctcgtaagaaccgtattttacagttccgccgacatgaatcttcgtccggtccacgccgtcggtgctggcacttccgcttccgctgcaggtaacactcgcgccggtcagtgcctcattatttgctccgatctccaacgctctccactgcgctctggaaccgccgtactgcactgtgcgcaatccggcacaccggttaaatgcgttatcgccgatatatgtaacaccgcttccgatcgtaacattcgagatacatccgcatccctcaaatgcatggctctcaatcacgccctgatagatattggcggattcaatcggcgcccacgcaaacgcgaacgttccaatgtaggacacactatttgggattgcaatactggtaagtcccgagcagctgtcaaatgcacttgccccaatgcgggtcagtccgccagccggcagattcaccgtccggatgccattgcaaagataaaatgcgtaatcaccgattgtagtcacactggaaggaaccgttacgcttgtaatattctgtccgtattcaaatgcgtaatcgctgatcgcagtcacaccgtccggaatctgcagatttgtcacttccgaatcattcagatacaaatgttttgcaaactgaagcgggtttgccagatagccaccaaaatcaatcctgcaccatgcagcgagatcgctgatatacacgccggtcagtccggtacagttctcaaaagcactgattccaaatccggtcacaccgcttcccaccgaaacggtattaagtgctgtacagcggataaacgccgactcccccacaaagccggacttgatcgttgcctgttgaaggcgggtacaatctgcaaatgccgcatacccgatcgttgagatcgtcgacggtgttgtcacactcgtcagtgaactgcatccgtaaaaagtacatgccccgatggatgtcactccctctgcaatatttaccgtcgtaatcgatgttttataggcataccacggcatacactgcggggatcccggcgtatcatataccggataatcatacatcgcaccgcttccgctgatcgtaagcacgcccttattatagctccatgtcagattgtcgccgcacttgccggaagctgcatacttcatattctctgtcacttttacggcagccacatcttctgccgcgctcatctctgtcacaggcttgctctccgccgcctctgttgcttccgtctcttccgtctcggtcgcttctgtcactgctgcttcggctgcttctgttgtttccggctgctctgtgcttccctccggcttcgcttctgcctccgcatccgttgtctgcaccgccgtctcttcaacagccgcgtcactctccaccgttgtctccgtcacttccgctgcatagactgcattgcccggaaatgccacaccacatgtgagtatcattgccagaaaagccgctaacacacgtctcttcataatctccatacctcactttccccgtatactacagaaggaatcctgccggattccttcccttactgctactatagcattttatatacgttttgtccatttataatccataactggcaaccatatttgcaaattcctgtgagtttgcaaaaccccagaatacagtctctctggaggtgccgttgttcagctggttcacccagtcattcagcccctcatcgtcatacaagcgtccgaaaataccgcggtagagcatcttaacataatcgctgtttgagaggttcatgttgatgcactcctgtgagaatacaaagccatacgccacattttccattccgtatccgctgttgatgcgtccgctccagtcatttaaaccgtccacgtcataggtacgtcccagaaactcggtataatttcttgccacaaagcgcgtcacattgtaattctgatcccggtcctcggtcaatgtgacggttcctctctcaatctcataggtattgcagagatttccgaactctgtggaatccgtaaactgccggaacacatagagtcttgacacaccatttgtcagatgtgtcacccagtctgcctttccgtccgcatccgatgcacgtcccatcaggcttaagtacagatgctccacgtaatctgcgtcgctgtaattcttgttctggaattcctcgctgaaaaggaaaccgtaggcaacctctgctccggtgcttccgttctcaagccggcctacccagtagtcgacctcagactgtgttgcagagcggtccagcacatactggtacaacagttttacaaacggcgccgccttgtgctgcgttgttgtgtccgtcgtatccgatgtatctgtcgttcctgtcgttcctgtcgttgccgtcacactcttgcttgccacattactgtcccagtaggtatcacatactgccaccgccttgaccgtgcagcttccgctcaatgtaaatgtcgacgaatatttctccgatctcgtgtaagccggcgtcggtgtatctccgttgattgtgtaatagatgatcgcattcggcgtactgctcgttatcgtcacataattgacattgttgttcgccgtaaccgaaatctgtggttgtgcggtctgctgtgtgatcgtcggcagggttcccggatcggagtacgtcgctccgctgtccaaggtacaagccggaagatactcactccagtaggattcttctgcgtgggagcttgcatagcttgccagatccgcatcatatacggcgtcgctccgctcaaaatattcatagtcgatggtgctctgatccgcccaggtacagtctacattgtaccaggagtcgttgatacgcaccttattccactcatggtcatcacttgtcaccgcaatacagtcaacacccacgccgttgcacatcatctcaaacgcctgcgcatatccggcgcagacggtcttatccatgcagaatacgctgtataccgactgtgtgtatgccgtatcttcattaaacgagttgccataaatatccgtattataatccactttctgcacaatgagatcgtgaatcatttttactttttccgcctcagagctgagtgagttgaccgtatttttccaggtatccacctgattcttcacactctgtgttgcagtgcttctcgccgtaccattctgaaaggcagaatagacaccgaatgccgcataccatacgctgctgctgcctccctgatacaaagacacattgataaaataatactgtggattcatgtaacggaacatatatgccacatacgtaattctgtttgaattcaggcttccgcaggatacatacggtatatgtccatccgtcagattatccgtaccaagaagcacctgtctgcaggatgcatccagtccatcccagaatttgcgctcttccgtcgaaagcatattatacacgtaattggacgaataagcatcccacgctgctgcatatacactggaactcttgctgctgtttgcctctgtttcgtctaaaatatcatcttctgcaatcgttccgacattgatcacgttaagatccagcaaacctgtcggatgtgtaatctcctctgcggtcgcttctgtctcgttctctgttgtgtcggcagctgccgctttcacaggctccgcagactccgtgctttccgcagtctccgtattttccgcagtctccgtattttctgcggtctccgtactctctgctgcggcggtgtccacagacgtctcttcagatgtctgctctgtttcttcctccgttacagtttctgccacttctgctgcggatacctgtgccggtgtcccgacacttcccattaccatgcatcccaacagcagtattgctgcaattcgtttcttcatacctaatactcctttttatgatcattacagaccgtagcttgcgatgatattttcaaactcttccgagttcgcaaatccccagtatacctcttctctggaagttccctgctccagccggccgacccagtctgcttttccggcagcctcagatgctctgcccaggcacaggttgtaaagcatttctgtgtaatccgcattgtttcggttctggttttcagattcctgcgaaaatacaaatccgtacgccacatccttcggcgactgtgcccccgaaagaatgatggaacaccagtaattgatgccgtccgtctctccggttcttccaagcgccttctcatagcaccggttgacatactgcgtcaccttgatatttttgtctctcgcctctgtgatctccgcctgtcccggtgtgattccataaccggaacagatatttccaaattctgtcgaccccgcaaaaccgttgataacatagacataggaaacaccatcatttaaggttgaaagccaggtattctttccggactcgtccgagcttcgatccagcattgccgcatagaggatgtccacaaattccgcatcagacttgttcagattacgaaactcttcgctcattaccagatcttttacgatctcagctccaccgttaccggcaaccagcttgcctgtccatgtattcagaccggacacatccgcatccctgctaaggatcttgcggtagcagcgcatcacgtacgccgtcgcattgtagttctgatcacggttctccgtcaggctcaccgttcccggtgaaaacatataataggagcacactgtcgcaaactctgacgactcaatcagctgttttaacacatatttctgtgagactccgttggacagaacctccacccagttgctgacttccgaatcctgcggacttctggcaaaaagtgccgcgtaaagcttccgcacgtacacctcattcgtgtaattcttattcttaaattcactgctggaaatgatatcaaccgcaacatcggcagcggtcatcgtctcctccgaaattgcagtggcatatgcattcatgccgcttgcatccggctcacgctccagaaggctctcatacagcctggtcacatacagctgtgcattctgataattatctcttacatagaagaaattgcaatccacgtaaccgcttataccgctcacgccgcccttgctgctgtactgccatgcgtaatactcgcctgcatacgtcgtctgcgtcgtataattggcaagccagatcttatagtagtcgtccagaatttcacctcttatgtaagactgcagcatggtcttattcgcatagaccatcggcgtatatcctgccgactgcaccgtggtacaaaaagcattcacaactgccgttgccgtatcaatatccagattggcatccgcaagacgtccactatggtttgtgccgaattcataatctatgaccaccggcagtgtgatattgtagccagagattctatttaaaagataatttgcctcttccgctgcctccgcctgtgtggttgcctgtgagaaaatatagacaccgactcttaatccggcattcaatgcgccttggatattggctcgatacttggaatcatcgaacaatcctccgttcgacattccgcggtatcccacacggatcagcgcgtagtcaattccggctgccttgaccgccgaccagttaatatctccattgtgataagaaacgtcgattccgttcacaatcttataaccactgtcgtaccgcccgttatgtatataggagcttccggtatatccactgtaagtcgccgatgagcttttgatattcgatgtgctctccggctcctcattgctcatggaggtacccgcctgcgggtcttcttccaacgcttcctctgccacagtgccggatgcctttaagtgccctgtcttctctactgcttccgtctcttcggtctcctctgtcttcccggttccctctgccgcttcggtctcctctgctgcttcggtctcctctgccgcttcggtctcctctgtcactgtcaactgactctccgagccttctgccacatcctccgtctctctctctgtcgacgtttgcacttctgtttccgtcacagatgccgcttccgtttcctccgatgtgttttccggatttacttcttctgtcgccatctccgttccgttttccgtaaggctctgtgccatcgctgcctgtcctcccggtattccggttgtcagaagcgctgccgccagtatacacgctagtactcttttcttcatcttgatccttcctctgtctaaataacatatttctaccaattttaattatacacgtaccgtggacaacgtcaatttacaaaatatgtatatttccttaatttttccggtcattcttccccagaatctgacagacctgtctgtgagagcaacgtttcctttatacaaaagagcccgcgctgtcaaatcgacagcgcgggctctttcttcctctgtatgaaactgtatgtcctaccgggacgtattatttactttaatccgtatgcacgtacaatgttgtcaaactctgtactgtcggcaaaaccgtcaaatacgctctggcggctggtacctgactgcagtctggttacccagtcattcaggcctgcctcatccggctctctgtccatcatcgtacggtaaagcatcgtcacatactcctgattactgagattccggttggccatctcctgtgaaaatacgaatccggatgccacctgcttcggtgtctttgtcttcgccagcagcttgcccgtccagtcattcagaccgttgacatctgcggcacggttcattgcgatcgtatataagcggttcacaaatgccgttacctgcggattcttatcgcggttctcggacgtcgttatggttccctgctgaattccatacacgctgcagagattgttgaactctgacgaatcggtaaatcctttcagcacatacgcacgggacactccgttatccagtaagctcacccagtttgccttgccatccgtatctgcattgcggtcaaacagcgcctgatacagaatgttcacatactgctcgtttgttgtatttttattgccgaactccgggctgaagaaaaaattccatgcagtcgtcgcaccggtcgtcgttccgttgtacagcttgttgctccagtcattcaagcctgctgtatcggcggttctctggaatactttctcgtagaggcgctgcacaaactgtctgtccagaatcaggcggtagtcctccagtgttaccgtaaacatttccttctgattgactacatccccgtttgtagaattataaaatgaggtacagctgatcgtataggttcccggcgtgtatttgctgtaatccgttgtgtcccagctgtatgtaatgtcggatgttccctttgtcgtatcaaaatccgcattctttcttgcaaccagatttgccgagctctctgtactgcccttgaaaatacggatctcatagcgctccatatcattgccgaacgttctgacgttgaagagcaggttgatcttggtattgttggaaaatgttgcatcatacatcgtcggatccggataaatcgatgcatgcgctcctgccccaaccattccctctttcatctccgtctgctcgcttgtcaccatcgtaagctcgtccgcatctgtctccgcaccgaatgccgtcacggaaagtgccagacttaagacaacggcagccgttacacttttcacccacttgttaaatttcactacatttcctccttctctatgtcacagcatagctattgtgctttcattataacttttattgtctgcacttgacaatcaaaaggccaaaaaaaattcttaatttttcctttattttccaaagctcgattctagtccacgccgtactcagccatcaggttatggaattccgtgcttcccgcgaatccatggaatacctgctctcttccaactccggaattcagctggccaacccagtcgttgagccctgcctgatcgtattcacggtctaaaaatgtacgatacatgatcttgacaaactcctcattggatgtatttttgttcaaaaattcctgtgagaatacgaatccatgcgctacattttccgtcgtatccgcttttgtcaggatcgttctgcaccagttttcaattccttcatcctctccctgacgatccagaagcttcacataaagccggtttacaaacgacgttaccccctcattctgatcccggtagcttcccagtgtcaccgttccctggatcacgctgtactggctgcacacatttgcaaactcctgtgaatttgcaaatccgcggtatacatactccctgctcattccgttggagagctttgcaagccagtctgcctttccgctgtcatccgcctgtctgtcaaacattacctgatacagaaggtttacatacgcctcattggagagattcttatttttgaattcatcgctgaagaaaaatccctgcgcgacttccgctcccgttttctctccgttgcgcagcgcctgataccagtagtcgatctccgaatcctgataggaggtacgtcccagcgcatcctcatacagacgcactacaaacgcacgcagcgccgcagctgtggcggtgttatcctgatcgtccggcgaaggacatgctgttgccggcatattgttgtatactgggatcttgaacacaaacggattctccaacgcgttggtctggctgtacgccctccggatctttccgccttccgtcatcggtgctgtgatattctgctgatactggtgggaatacaatccgttataggaagcatccacatcaaatttctgcagataaagggtgtcctgtccttttaagatataattttgcgagatatactgtgcaccaccggtcaaggctttcattctggtatcccagcctttattctgggcagttttcaaaccattgacatagacgtccgtcgttgtcgttccggttgctccgatgttgtagtagttgtaatatccctcatacccaggatagtttccggaaatcagcggcgatgttcccgcgcttccctgctcctgatatactctgcatgccaggaaaaacgggctgactccgagactgtttccgatgtcataaaatgcctgcgcataggttgtccccgctcccggcacttctccctgcataaaagagccggacacaatattggaaaccgcatccaccgtgtggtactgcgcattatatgtcagctgctcaaacataaatatgtaggaatcgttagtaaaattacgcggatccagacagtattccactgccgactgcgacgcaatgtaccagccgctctgggaggcagcctccgccttccagttgtcccctttgctctgatgcacccagcttctgttgttctgcatctctgcgctcacaacactgctccactccagattcgtctgcatcggtacaaacgtccagttcggatgggatgctttaagctgtgtgagtgctgcccggtaggactccgggaacgcaagaatgtcctggttgccgctctttttgagcttctcacccgccacttcatccgcagcgccaagcttctcctcccatgctctgaaatccgtatcactcgtgacaagatgtgctgcttcaatatagccgtaccgctcctgcccgtccactgcaaacatgacatagtaccagacgctgccgccatcaatcgctacatccttaagcagcacctgactaccggacggcaggcttccctctacggcgctgtctgcatccggctcctcgcgcacctcatagagatctgcgagatagactgtcgccatgactgtcttttgctccagaagctgcagtaattcctgacgcagttcatctgtttttgtctgcgtctcctcggtctgctctgttgtctcctcaaccgcttctgtcgcctccgactgcacggcaatctcttctgactgttttgtcccgtccgattgttccgtcatctcctcggtctgttccgtctcttccgtctgtacggcagcttcctcagtctgctctgcctgtgcatactctcccgctgtcccgttcagttcctgtgcggcaacagccacaccattccccgagatcaggatcgccgctgtcagggctcccgataacagttgtagtaattttttctttttcaaaattcattccccctctgttcttcctgattatggtttcaccttagtataatctttttcgtcagggattacaacggggaatgggctgggaggattttccactataatttctactttatactattgtatattttttaatggctctccctaaattttgcaaatgcgtcgcctgcgttttgcgttctccccacctgcaaatcctcatatcctttttgcaatttagcatgcaattcttcttttgtcataagatcagcatccatcccgccaggtaccttgggtaacgctttcgtcattacataccatgtatcaggatcatccctcacataatcatattatttccatatataggaaaaaagattacctgtagtaatcggaaaattctttactaatcttcacgttactctttctactttcgtcgacgctcccaaaacaaacgtagaataatatttcaatgcgcaaaatataacccgttcctcaacgttttaatgggcattacatttatcatcatctcctttctttttttcagagatcatatttaccagtccaccaatcagcactgcatccataagtctgcataatatgtaatttgccaacgtttccacaatctgattctttccatcatttatacgcactggctctggtaaagaatacatattataaactgcagtgtaataatttttccaaccgtcttccactctgccttctaataattcaatgtttaaaaatccgtttaataccaccatccctacatatgctccgattataattatcattcctgccagtctattcgttttctttcctatattgataaaagtacatatcataaacagtgccaatattttaaacaaccagaaaaaaaagctgatttcaaataatactatcgcaaataggaacgcaaaacaaacgaaccctactgccaggaaaagttcctctacccattctttacatttaaaatagtgtatgaaaaacgcaatgattcctataatcataagcccacaaaaaaacatagcctcaaacctggtcacgttatcatatactgcatctatcataatattcattgccaatatcataagcacccatccgaatgctttcatcttttttattcctgaattatcaaaaaatgtctcggtaaattcatatgtgcaaagcaacataacaatgcccaatatcattacaatcgaagtttcagtgtttataatgactaatattaccaataaaatgagcaaaataattcctgtaatcaataatatgctagattctttgtctattccttttttactgcaattatccatattgtcctcctgatcattatattctccatcttacaaaagaagtttctattttacaagaaccgctctgcctaactttcttttttagatagacagagcggtcttggtttatcctgacaagtattttatgaaactataaaaaaacagggtacatatttctatgtacactgttcttttcatcattcctatccaaatgacatttacctctcgactgcccccttccttctatccgcagaattcctcaatctgccgttccatacattccacaatatctccatgcttcaaataacagtctgaccactccacaatcttttccatagtcttctctacgttccataccggtttccagccaaaggttctcttaatcttagagcaatccagcttcaggaaatttgcctcatgaggaccaccatcatacttgttcacccatgtaacctgtgtaccagtctgtttctcccactctttacagaaaagatctaccaaattgcctgtcgtccagcaatctgtctcatccggtccgacattataatttcctgcaaacttcttatcttcatactgagcctttgcaatcatcaaatatgctgtcaccggctctagcacatgctggtatggtcttgtcgaaaacgggttgcgcacaacaatctcttctcctttttccacagctctgatgcaatccggaataatacgatcagtcgcaaaatcacctccgccgattacatttcctgctctgcaggttgtaatagcagtatcactgtcctgaaaaaatgatttcaaatagctgcttgttaccaattccgaacaggattttgaattagagtacggatcatagccgtttaattcctcgttctcacggtatccccactcccactctttattaaggtacaccttatctgtcgtcacattcacaaatgatttcacacaaggatttaagcgcacacattctaaaatgttaaccgttcccattacattcgtctcatatgtatataccggattctgatacgattcccgcaccaaaggctgcgccgccatatgaattacaatttcaggctgtacttctgcaaataccttttttaaatgttccagatcgcgaatatccccgacaaccgaattcatcccatctgcaattctgcacaactcaaacagactcggatcagtaggtgcctttaacgcataccccgtcacatttgctcccaccataatcaacagcttacacatccaggaacccttaaagccggtatggccggtaatcaatactcttttatctttataaaatgataaatccattattttcatacctcacatatgctttccaaaagcagcctactgttgatccggctcataacattttgtgcaattcacagcttccttaatcgtctgagccatatagtcaatcatctcatctgtcattccgggatatacgcctacccaaaatgtatcattcataatacgatctgtattcttaagttctccgacaatacgatatccctttccgcttgcccgcatctgatcaaaacatgggtgtttggtcaggtttccggcaaacaacattctcgtctgaatgccatgttcttctacataccggacaaccttattacgttctacgccttccttgcaggtaatcaaaaatccaaaccagctgggttttgcattttcacacggcaccggaagaatcagtttgtcttccgtccccaccaacactgctctcaagcgttcaaaatttgctcttcttctctctgcaaaatccgggagtttctcaatctgtgcgcatccgattgccgcctgcatatcggttgcttttaagttgtatccgaaatgggaatatacatacttatgatcgtatcctaacggaagctccccgtactggcggtcaaatcgatgcccgcaaaggttatcctggccggagccgcatacacagtcgcgtccccaatccctcatagaacggatgcacttattcaacaacggattgtccgtatataccgctccgccttctcccattgtcatgtgatgcggcggataaaaacttgatgttccgatatctccgattgtacccgtgaacttctcttctccgttcattgtatacttcgtcccaagggcatcacagttatcttcgattaaccacagattgtgtttgtcgcagaacgccttcactgccgtcagatcaaacggattaccaagtgtatgcgccgccataactagcttcgtcttctcagacagtgcttcttccagcattgcgacatccatattatactgtggaatcgtcacatcaataaacaccggaaccacaccatactgaattgcaggcgtaaccgttgtcggaaatccagccgcgactgtaatcatctcgtctcccggttttacctgacgctctcctaataacggagaggtcaatgccataaacgcgcaaagatttgcagatgaaccggaatttacaagcgagcaatagcggacacccagatactccgaaaatgccttctcaaacttttccgtatatcttccggatgtcagccaaaattccaaagccgaatccacaaggttgcacatctcttcctgatcatatactcttgcagcatatgtaattcgatcccccggttcatatggcttttttttgttatgataagtgttgcaatattctgcaaccatagttaatatttctttttttgcctgctcttctgttttattctcaaacattttttcttctctttccctaccatgacttccatggcgcattcccgctctgccacaagttctccagcatatccatctcacgctttgtatccatacattgccagtatccattatgcgtgtacgacattagttccccttcagccgcaactctctctagggaatctctttcaaagacggtatcatcaccttcaatataatcaaaaatctccggctctaataccatatatccggcattgattggtgcactgtccatgaaactcttttctctgaatgaatgtaccgcattatctccgccaatatccaatacgcccttttgctgctctaacataacagctgtaagcgttgctattttaccgtgccggttatgaaactctactaattttgcaatatctacatcacacacaccgtcgccatacgtcatcaaaaatctttcatttcctatatatggttgaatacgtttgattcttccgccggtcatcgtatttaatccggtatctactactgtcactttccacggttctgcgtgctgattatgtacaatcgtcttgttcccttgtgtaaaatcaaacgtaacatctgatgtattaagaaaataatcggcaaaccactctttaatcatttgctgcttatatccggcacaaatgataaactcattaaacccatagtaggaatattccttcataatatgccatagaatcggcattccccctatttcaatcatcggtttcggtttatactgtgattcttccgatatccgcgttcctaatccccccgctaacaaaacaactttcatctgctgttcctccctgccgcactgatcccctaatcaaaaaaagcagtcactccttggggaaagattgctttttctgttggtttgcgtatagatctccgatattactcttagcttaatgctgctgttcttctgcaaattaaaataaatgtcattcaaattatagtgcttttgtcgttacttatcaagtttacctaggagcgctgggcttttaatgtcatcttttttgccagcctgtttgcaggcatctctacgtacctgtataccagttccgtaaacacaagcgtcaatacaacagctgcgaaaacatagactgccttattgatcctgcccaatccataaaactgctgaaatgttgcaaatacagttgcatgaatgaggtacaatgtatagcttctgtcagaagtccagttaataatctttgttaaaatgccggtgccttcctttaactgaccggaacacaatataacgattgcgatcaggcacgcatataccaggaaattcgctccttttatcagtgcaattaccactgcaaacaaagcaaacacgcagcaacctcgtttttcctcctcctcatctacatatatccttgccagcataccgatcaggaagtacggcagacagcttatcggactcggaaatgcattcagatatacatactgatcataaaatgtctggatgaaaaccgatacgaccaatattgcggcaaacacttttgcggatttgttttttataaaatgagtcaacggatttattaaatagaagaacataaatgcgctgattgtccatgttgcatttacattgatccaaagcccctctcccgtaggcactgtcgtactaaggaacaggaaataccgccaccagtacattccggatgaatcaaccggccagttccagtttaacaggattccccagaagaaaatattgtaaacaatcaccagataatacaccgggcagattcttaatatccgtttcacatagtaggttttgatatctcctacatccttttttaccgataccagaaaaccacttatcacaaaaaagaaatatggcgctatcccgcctatcgcaagcaatgaactcgttgttccgccaattccgaacatcatattattcatatggtataaaataaccgcaatacatgccagtgcacgtatcagtacaatattatatttcttcatcttttcttcctcttgaactacagaacaacatcattcttctcttatcttgcaaataagaaatagcagctggctgtcatcagcacaattacgatcgcggacagctttaatccttcttttaacatatatttcggctgaagcccgtatccaaccgggatcgccctgattgacgtcggaaaacaataagataaattcactccgacggttgcgacatatatgtacgggagcggattttctccgattccctgtatgatagaaacgacaatcggcactgcaaccgccgcagttgctgtgtttgaagtaacatctgacaacaccagcgtaaaacacataatgacaaaaaccgtcaccagaccgccttttaatcccatttgtgaaaccgcatttccgatcgcagccgccgcaccggaatcgttaatcagggttcctgctgccagaccgcctgcaaaaacatagatcagttcccatataatctttgtctgcaccgatttccacatcagcaatcggttacccgatgtatctgtaatgaaaaatgcaatgattgcacaggtcaggaatacatacgccggttttaatcccggtaaaatgttttgatatgcctgtcttgcgaatgataaaacggttgcaatcaaaaacaatgcaagtgatactttctcttcaaagctcatcttgtccatcttctttaattcatttgcaaaatattcattcgatgcaccaagatcttcactcttatcaacatcccttatcaggaataaaatattgctgacaaacagcaggatcataatcgggaagaatcgcaccacccagtccagataaatatactcacttccggttatctgctgtatatagtcaatgacaaccaagttcatcgctccgccaaggggcgaagccagaccgccaacaccggctgcatacgcaatggtcaataagatcttggatgcaatcctgctgcttgcaacatccctctctccgatataatttaacattgatacggcaatcggcgtaatggtcgcacatacaactgcgttcggcaggacggatgataaaatcgctgacagaaggaaccagaatacaacctgttttttcagattacttccaatcagatttaaaaaccggattgcaattctcttatccagtcccgtctgctcccaggatgccgtcaaaatagaggcacctaacagcagcaggatcgtctcagatgcataatttgcagtgatcgatttcatatccaccatctgcaatactgcattgactgcaatcggcaaaaacgctgtcacagcgtagtcaaccgggccggtaatccaccagaacgccatccatacaacggttccgatggctgctctgctctctaaagtttcaaaaatagctgccggcaacaggactgtgcataagatcattaaaagcggtccaatcaccaataatattctgcgattacttttgttcatttttttcctctcattctacatgatttatcagataatcttcatactgtcttaaatattccgcatccacatcccatgaatttctgattgcttcatgctcttccgcaaatgtattgaaatttacctcgtcaagcacaatatctttatcctgatcgtatactacaatatttaagccgatttgatttgttccaaatgtttctccgccgatctttatgccggacgtacttcccacataatggcccgcactgtatagtacatactctacagaatccccaacggttcccttctttttgatcgcgcggtttgacatttgctcaaacgtcacttcaccatttttcataacagcaatataggattgtctatagccgttttcatagtctgcgttaaatcccatactccgcagaagactgatctcacgttcactcaaaccattcgacatctcattggtacaaacaataaatacggttttgtccgcgaaatcgcttttcagcttgctcatgtactgataaaaatcggtttccatttctaaggatgccacgttttttaaatcgtcatataactttgcatcctcattccaagcggtatattccttctgttcgagcttataattttctaccaaatactgtccaagaatatctgtaaccttctcagctcccagaaaatttagatggcctcctccatctgtactatctgtggtccaatcaattccgcaatccacatcatacaataaatcaaaaaaatccagttgatattcatctacaatttctttcactgcagcacttcgttcttgagtccatgctgattcatatgcagcaggcgaattaacatcaggaatttttactaataatagctttacatcatttttcttgcaaatatctacaatatctagtaaaagttgtaaattgtaatctggcacctctgccacatataattcatcatcttctttttctttacaaaattgttgatttttccacgtatatgttactttttcattatcttgaagcatttcctgtgtttcataattcatatatgtaacatctatatatgatggtatacaccttgagtttaaataatatcctttcataaaaaaatgtttattatccctcatatatgtaaaatcattctcgtctaattccttccatctggaatgatagttaatcataggaaataatccggataccatatcatcttcatcatctgataatgtactcatctcctgcagaagctgtaacttttccgcgcttaatggaacttgctccgtaatatacttaaagcctgcgccatcatagaaatctgtaaacaggctgcttacatccagtacaaataccttgggatcctgcgttttcaatgctgtctgcaacgcataacgcgcgactgccagcggttgtcgtgcactcgcaagattataggatgtaaaaccatattcctcatacaattccaccggcgatacgctatatgtcatatggcttgttcccgcaaatattgcctcaatggaatccttctcttcatcaaaaaatcctctgtaaattctgcccgccgcctctgcgactgtagtgttgggatagtaatactttggcatcaccattctctgcgcgccccagaaaagtccacctaaaattccaaaaaatactgttactttgataacattctttttcattgcaaacgctactccatcaatttctttctctgaagttttccattcgagcttctcgggatctcagatatcacttcaactgcatcgggtactcttgatgcttccagagatgctctcaaatattcaaaaaactgctgctcgtcgtattccacagaatccgcaatctgcacaaaaagcttcggaacctgtccgcagacggcatccttcgcgggtacgcaggcacaatccacaatgccgtcatacttcactgcgacactctcgatttcttccggtgcaattttaattcccttgtaattgatgacgtcatcttttctgcccatcacatacacgcgtccggcttcatcgatgtatccgaggtcatttgtatacaaaacgccatctaccacggtcgccctggtcaactcctcactatgataatagccatccatcatcattctgccttttaccgcaagcagtcccggatgaccggcatcactctgcatctgctttctgccatcatccacaatgaaaatctccgcattgacggcaggatatccgatgcatcccgtgtgatcatattccttaaaatccagcacacagcttcttcccgcctcggtagatccgtaaaaattatacaggcgcgtctgcgggaatatttcctttaactgctccttggtctcatcttccagaactgcggttccaagctcaatatactcaatcacatccgcatatttcttaagcccccttttggcgattttgagaagaagttttgccatcgtaggcgaaatatcaatcgcatttacgccatacgtttctatcaactcaaataaagcgcctatcttgagcgcaccgtctgcaattacaactgcgctcccgttgtacaaatttgcataactggttctaagcgcatgtgaatggctgagcggcagcggaatgatctccaccgaggatgcattcatccggacgccctgctggatattctgcgcaatcgcgatgttcgcctgatgtgagattacaatgcccttgggctgacccgttgttcctgttgtatacagaatttctgccacatcattcctgtgaacatagttcagctctttttccgtgacgccttctgccttctgcagcacgtcacttacctggtaacagcagcctgcagactcataattgctctctgcaataatgcatctggcatccatttcttcatagatgctgcttacccgctcctgtgccgcattcttctccaacggcacaaatacagccccgatatattggcatgccagatccagcatcagaaaattcacatcctgggtgcactccacaaggacataatctcccttggaaaccatgccgtcttctaacacaacagccagctttgctatagtatgtgccagttccgaataggtataacctctttttccatccgccatggcaagcttatccggagtttctttgctgtgccacagtactttttctacaatggatctacacatatttttccaccagagcggtcatcgcatcaatagagttgaaattttccggcataatttcttcgtacgggatctcaatatcaaactcgtccatcagctcgcttgcaatctcaaccagtgttacagaatcaatgtatccgccgtcaatcaaatctgttcttgtgtaatctaccttctcatttactctggtacatactgctaatactttttctctcatgttcctgttctccttttcgtttttattaaaacgcaccatacacaaatgcagatgcatcatatcctgctccatatacgcccagaatcacaatcacaaagatcatgccataataacagatccagcgaatgggcagcggctgtgcagcaactgtttttcgtatcctttttcctttttcatgtaaaacgtctactatgaacattgcaacaattccaatcaggacgacaaaacaatctttctcatccaggccatatgtataaaatgttccatccgacagtacccataacctgctctccgcaaacatctgcttccacaaaagcgcgcatccctgcaaagatcctgccacagtaaacattcttccgattgcaaatatgaaatacgtccgcacacattggaaaagcttataatagcgtctctgtgtatcgaccccaatctttttatacaacttatcccagataaatgccgtctccttggacagcgtcatcagcagacaccagtataagccccagacaatataatccagtccggttccatgccacagtccggtgaataaccagacggcgatcaaaggtaccattccctttaaaaatgaagacagccacgtttttccgtttttcttcattttcttggtaaacttaaggaatttgggattcattgcgatcggaagataaatgtactctttcgtccatgcgcttaaggtgatatgccatctcgtccagaattccgttgcactcttggaaaagaacggctgacggaagttctccgcaagctcaattcccataatctgcgaaataccccggacaatatccatgcatccgctaaagtctgcatacagctgaacgacacataatatgactgcgataaaaatttctacgcccgcaaactcctgcggtgctgcaaatactccctttgtgtataacagaatccggtctgcgatcaccattttcttgatgtatccccagaacattaactgaaatccgaaacacacacgctcaaagtcaaacttcgggatctttctgaatttctctatcagatccgaatatttgctgatcggcccctgcacaatatgtggaaaatatgtcattaccgagaagaactccacaaaattgtgcgtcggcactacttttctccaatatacatccagtatgtatcccaccgtcgacaaagtgtaataggaaatacctaacggaacaatcactcctgtcttttcatacattgcagcaaacgtcgttaccgtcgcaaagccaagaagctttcccagcttgacaagaatccacacgccaaacaagagaaccattgcaaggataagatgttttctggccttcttcttatagccgttaaacaatgtgacctgctctttaggggaaagttcctccttttccccttcgtaccggctgtatattttttcgatcttcaatgtcgcaaagaaagcgatcaatccgcttccaagcacaatcagcacaggctgccagcctgcccacacataaaatataatatttccggttaaaatacagatctgtttcttcttttcatccctgcacaaaaagaatacacataaaaacaaaagaaagaacacaaaaaagagtagtgaattatactgcatttttgcgctcagaattgatttccaaaaagagtctccatttccaataacctctaacaactctattttctccttccactaccacaagcgcaatagattattctttattttgttgagtacccttttttaatttagcaactactaaaccttttataattttatacaattcagctaatccacaacataaaaataaatcaataagtattactaataaattctgaacaaacgtgtttgtaattcctatatttgcaataaaatataccatcatagatacagacacttccagcaaaggaaaatgtaatcctaaaatatatattgtgtttttatcaacattttgaaacaacttattgtttataaaaagatttgcaaaaatatatgttcccataatagtacaggtagctccaaaaaaatacaaataacttactatattagaaatatcgccataatttattgtcgaaattttccatcctaatgcaatcaaaacacaagctatcgcatagttgccttttattttatcatacaagtgcaaatccttatctatcagatatttaaagccatatccaatcatcataaaagtcagtgctgcaggaagtacatttatatggaaaacaggtcttcctggtaccatattctgaaacggaattgttacaaccgcagtaactattaagaaaattaattgcagaattttattaaagtatctaactactatctcaaagcaaatacatgcaataaaatatagctgaaagtaccataacgggaaattgttactgtagtccgccaaccaatgtccccctcccaataatccaagtagctcattcattccaattgtagctaaagtatgactttccatatagcattttatctgattataaattaacatacttactacccaaaaaatgacatacggtactaatacactctttatcttctttgcaataaaacttctccaagaatacacttttccattatatcttaaatatccagtaatgaagaaaaacaatggcatatgaaatgtatatataaatccactaaagggagaacctgaatgccctgcaatcactaaaaatattccccacgcacgtaatacatcaattcttttatctctttccataatcattttccctttatcgttctattttttaatcttccacattccatgtatttaatatattcccatttaccagaaaactcttctgcgcaatctttgccatcggcagatcagaatgagaatccgaataaaattcttcaatcactccatccggcagatactcataaaagcgccggactttttcctcccccttgcagttacttccaaaatattttcccgtatgtatatccaccggtgatgcaatcaccttttggatgtttaagcgctctcccatcggctcaatcaggaactgtggagaagcggaaatgatcatatcatccactctcttttgtttttgataccacggcttaatttttttctcattggcattccagaatgcctccacatattcttcgggttcatttaacgccgaaagaaacacaaaaaacgcttctttaaactcctctttcgtaatccgcttcaatgcatagcgacaggctccaaagatctggcgcggtacatatcttataattgcaggcttctttttcagacagtagaaaaagaaatccacggtactgtcgcccgcataaatagtatcatcaaaatcgtatacgttcatggttcctccctacaacacgtagatactgaagaatgcaataattgcatacaaaagcacacagaccagtaacagcttgtcctccagaaggacatccatcggattgccttccgaatcatctgcttctatatttaaactgtacttcataaaaataaccatgacaaccggcacggtaaacatcaatccggagtgctcgctctgcattgcccacagcgcatacgttacttctgcaaatgcgatgcacacatacatgttcttatctaagaaggcataattgtattttcttaatacagcgcgcgtctctccctcagagacatttttcagttcattgcggcgttttcccataccaagataaaatgctcctgcaagtaccgtgagatacagccatgcggagatatccacctgcacaacctgagcgccataatacagacggatcagaaatcccactgccagaagaaccacatctaccaccggtacgtgctttccccatttgctgtagatcagattgattacaatgtacgcaactagccatatgacagccacataggaataaagatcaagaaaaaccgcggcaaacgacatcacagcaaccagcaaaaccagcattgcgcaaaatacccatgctgcctttatagaaacctcaccgcttgcgatcgggcgcttacactttgtaggatgtttccggtctttctcaacatcattgatgtcattgatgatgtataccacggacgctgccagaccgaatgccagaaatgcatagaaagattttgcgatcattgtataattgaacaatacctcgccaaaaaacaatggcgcaaagatcagcacattttttaaccagtgttttactcgtaacattcgtacatatttcttcattttatctgtcccttctatatatctctacggaatcaatcgtaataatcgtgccgtccgagcagtataccctgtaattgtaattaccgctttctgcctcatccagataaaatgactccagcacagcccgattctcattctttttcagatccaccgtctgaactacttcttctacctctcctacaacggaatatacgatggaaaaggtagccggcgaatctgtctgctccgcggcatctatcgtataatttagcgcaaaatcataataacctgaatgatcggtttccagcttagggcctgccagcacccatccgcagctgccgtccgagataaacttccctgtttcatcatattcgcccaatcccgtcgttgcatctttactatacgggaaatcgattgcatagtccctgtctcccgtaccgctttcaagatccatgatgttcgtgtcagagtagaaaacagcatactcgtcattttcccataccttattatacttcaactgcataaattctggcaaactataataatcaagctgtgttgtcagcaatatggtcggaccgtcccagtccgaattatcgcaatattgggtgatgtctccccatttgtgcgcagcattcatatctgtcatcacaatgtaggttttattggtatcaaatactcttaccgcccgtttctcaccattttccatactttccccatacacgtacacaaccggggcatccaacttgtcgatttctgccgtcacttcttttaattcatcatagttattttcaatgcctgaataattgactaccgaatatatgacattgcagctgatcagaattcccaccattcctatgacgaaattgcggtatccgctgttattaaggcatatggctcctgcaataaccaccatctcggtaatgatgcacggcagcatataacgtgtctcaaaaaccggatctccatatctggaattgataagaagcaagagcaatgcgtttacggctccccatgcaataaaaaacatatacgctgttttcttatacaccttccgtctgcacgcatagacaattcctgctacaaaaacaactgccatcagaagaccaagtacaaccgcgatgccctccgcggataacgccgtcacattggattctctgggcagcgcattgattcccagcagatttcccaacagaatcgagataaaattgtcccacaaatcttccagcccgatccatgcaattacatcttcacgacttttatactgaagaacatggctctgtaccagcttgccgatgacaagtgccgccatacatgccgcattatataaaatagtgcttaaataatccttccgttctctgttcgtccagaaataccatactgcatacacacatcccggaatgacggcatacatggcaagatggtacccgctggacatcccgctcacaaaaagaccgattaccgtcaagagcatccatgcatttttcctgccggaatgcagcaaccgctccatactcaacagatacatcagggaaatcagtatttttacactgtaaaatcctgctgatacaaacagacaggagtaatatcccagatcattgacaatatcaaacggagtcgtcagatatggacataaaaagaatgccagtgcgaccagacggctcatctccgggaagtccaaatcttttaaaatgcgacgaaaaagatagatgtttgccgctgtaatcatacaatttgcaataccataagaaggaaagatattgtgaaatacgttcatcaacagtgccgccagtggaactggggaatcgaaatacaggcttgtctgatccacccagtcgctgataaaaagcgtcctctggcgatacatctcatacgccttcaaaaaataggaagatgaatcatactcgcaatagtatcttaatttgatcaaattaaaatatccgatcaatatcacttctatgacgcatatgattctgaaaaaatttatgacaaatctgtcattccatttatctgcattcaatctgatcttttccatatttcctcaagtctacttctttataaacacaaaaactttattcaacaggtaagttcctacaataatcgccgccgacaatatgattctgcttggccagagcggcgctcccagaacggacacacacaggaaaaacagggcattatccaaaaccagggacccgattcttacactgcagaactttccgaactgaacgatgttttgtttgatgccctccgccttttcttcaaatacaaagaatacgctgaatacatagttcacaaccactgcaatgatatacgcgatggtattggcaacgatataattcattcccatttccacaaacacatataataacgccagattcagcagcgttgtaattccgccaaagaagcagtactttatcaattcaaaatactgtctgattttactgagcatgatccattacctctttaaagcattttaagtatgcatttacacaccactcggtactatataggtcatgaatttcctgatgtgacttcgtatatttttccggatcatccaatatcttcataatgcagtccgccagactctgcgcatctccctttttgcagaccagtcccattccggtgtttcccacgatcgtccgcacgccgtataagtcagacgccacaaccggcacaccgcagagcatcgcctcaatctgaaccatgccaaatgcctctaacggattgatactcggcaggcagaatacatctaaggaagagtagaactctgccatcttctcctccggaatctttccgagaaattctacatttttgatattctccgtctcgattaacgcctgcagctgcgggaagatacttccgcctgcaatattctggtaatctccgccgatcaccagtttcacatcgtctctctgctcggcaacgagcttatacgcctgcagcagcacgtcaattcccttttccgaaacaatgcgtccgcagaatccgatgcgcttgaactgatccgctctttccacttccacgcgatggtattccttgatcggggtgtgaacctccaccattttatcttcaaacttatatgcaatcttggaatgttttccgtagtctacggttgtgaccaggacttttcttgaattcttcagcccccaggtgttcatcttgagcatgattccctttatcatgttattgataagccccggcgccagatcgatgtcgcagtgatacatggagacaatctttttcttatctccaagagcactgataattcctgcctccagcatcggcagatgcagattcactacatcataatccttctgcatcttaattgccttgcggataaatgccagactgacagtacccttgctgatcttgcagatgattggcgcacgcagcacgtttaccccgttaatgacttcttctgccggtaatttatcgtgattggaacaaagtaccgtcacttcatgtccctgctttgcaaaatcctccgcaagcagtcttacgacttccgacaagccactgatatacggataataataattgaccaccagtaaaattttcatttttattcctccattgtgttatttttatcaactgtacaggtgaaacgttttaatgcgatctcgtgtccctcatagacaaacacccttatttctacttccgttttctccgggatcacaacattctgcagcctgatctgcactgcatccggttctatctccaaagaggcaaacacctgcgcaccatccccgcttacgacttccgcaaaaccaatgctgccgtcgcctgcatctatcatatcatagtcaaacgtgatatcatataccccgggctccatctctgcatatgggccatacaccatatactgggatgaatttacatcattaaacagtaccccgtcctgttcctgttcctctggcggatgcaggaagaaggttcctccaaactgggtcgtaaatacatccggatccagcttttccgctccgtctatagttcctttaactcctactgcaaaaccatcgatcaaatataaatttaatttcagatctttaaacagcagttcaaatctatttccaaaaatatagattacgtcgtcctcagccagaccggtctcaaggttttcataaatcttcgcattgttcgcattcacaagttcatcatttggtcttgctgccgggaagttattgattgtgagtccgtgattgacagcaaaatcggccagtgaaaagctgtccacataatttttgtgtactaatgaattctcttccaccaacacaatgtgcgagtaatcatgtgccagcttttcccacacatcactctgcagcacattatactctgactcctgatattgaccggcatcacccacattttttctcaaaaacagcatttgttgcagatctgcgatctgtaaccctatggttacaaaagcaattacgacaattatttttttcttattgccggctgcaccatctgcaagcattcccacgcccacaaccgcagcaagcatcaacacatattgtcccagccatgcaaatctgcccgttgcccggaacatctcataaatatgaatcacaaatcccggatacggaatatttaccagcagcctgcttccgcatgtcacaaccgggcttaacgcagcaacaaaacttacgacaaatacaaggacagcaaacccgatttctttccgtgaaaagcttactttcttttttacacatgcaattaccgtaattaccaatagtatgataacgcctaagcccacataggcataaccctcgtactggtcattgcaatacagctttaattgtggaagaataccactccagctctgcgaattaaaaaacgtatttaaattggcactgtaccggcccaatccatcctctgaatcaaaggttctcgcacttgaaaatcctcccagaagatatatatttccacatgctgcaagtaccggcatcacaatttccagcaaaaaaccgacgagcatgcttttgagcacgcctgtctggcaattactttttaatcgcacacagtacattgccaccatgacgattcccaccataggaataaaataaatgtgtattcccgcggcagcgatacaaagcagggaccattttatccctacttttaaggaattgctctcatccctgtttttgacaaagatcagaaacgccagcaaaagaaggaagtgccccgccagctctgaatgataatataatctgtagatcatggacggactgagaataaaaaattctgttcctatcaactgaacccacctattgtctacatagtaagcaataagttcataggcacacaatccctgcaatataaaacacagcagtccccacagaccaaaatattgaaatgtctccggcaagataccgctgaacactttaaaaaatactgccagaacgggcactgaatcggtaaagataatcgagattttgtcgggatacatcatattatccataagtccgaacgggaaattccacggtgactgtctgaaaaacttccagcctatataatgtgctctcaaatctctctcggaagcaagcaaccatgtatcatttgtcacatctaatacatcaataccatatagtataatgaaactaataactgctaacagtaacaccagaacatggctgctgttaaatctcttccttttttccactttataatccctttttcaacatcaacctataagtatcattctctatcgctttgtaatacgaatatcacttatttctgctgtcacacctttattgagccagactctcgcctcaaagtgttcgcaggcactctccacctcaaaatccggtatttcaatgtttccatcgttttcgtaaattttgactttcgccagcgtctcatcgttatctgcatcaaaaatttcaaagaagccgacgcacttgtcgcttgttgtattttctacaatctgcaaatcgcagactgccgaatacgttccctttatcagcggtgcgtatggtccgtagattttaaatccgtcggactgtgcaatgcagtagacataatcatccatgctgatacagtcatccgatttcctatactcctcatccccgagtgtatacttcaggtcgccattttcaaaaaactgtttttcaaagtccaattcatagatgcagaaccggtctgtctcatacaatatcttaccggctgtccacttctcatcaatttcactctgttctttatcaacaataatggcattggcatccagtttattatgattggtgtatttatagaagtaactgtttcccggcacaaccaccttatcgtcctttaacgcgtaaataatctgatgttgcgtgtcgcagatatattcttccgggatcagaatctctaaatcatcatcaaactgctccgacaatttatccagtttgtttaagtccgccgtatagacgcggtaagaatcgttcgggaaacaccccatgatctgaatcacattcgccagcaacacacatacgatcaccgtgtatccgccgagccatccaagctgcgctttccccttttccgtgaacagttcttccagttccatcaaacatttgatcagcagaatacagataaacggctgtacggaaatcagatgcttgaattcgccgtaatcaaatcccataaatgcaaatgtaagctccagcgctgcaaagaacgcgcacactcccaagagcgcaatcatttcatagtttttcttcttagatacgacgcggatgattccggcaatgatgagcgcccatatcattaacgatccgatcagtcctaagatcccaaaggaaacaggtacattcgtatccgggctgaacgaaaacccaagtaaatcactcaggatttctcgaaaacgtactacgatccatccgtctgcatttaatgtatcaattccctcatttgcagaatcgagcagatagagataataccggaccaccttatagctggctggtgcgcagagcaccaatcctagacagcccaccccaaatgacttataaatcatcggagccacttttatttcttttctgtaatagagaaagctgattaccgtaatcaccacgaaaatgataaacagatagtaagcaaattctgaatataccgcaaaatccgctgccagcatgagtgctgtaaagagaaaccacagcaattttctttctttccacatgaggatcattccaaataccgttcccgccatgcagagcatgccaaagatctgcggtccatactggaaaccgagcagtgcccacatatttaacgaaacagtcagtatcgccgccagtgaccaccaccatttattgcgtatttcaagcactctctcggcaaagaacaataacatcatgttgaagctgactacagttgcgacacagtacgcaaagaaaagctgattgccttggagtccggtcagattcataagcacgctgccaagtacatcgaagcccagtcgagaataatgtacatacatattttgtgtcacgaaatagtatggcgtcacatctgtaaaggtcggcttttcaaaaaaagtatgatttgtcaaccagtccatatccgcaaggtaatatatcagatcgttattcgttcttgtgatactgaccagccccgtctgcgtcaataccgggatacataaaatgacacaggcagcaactgcatagattgcaaacctcttatatttcagttcattttttgccgttgcaagcatttttctgcctcttacactaagcatgacgataaatacgcccaaaacgacatatttcatgatccgtaccggagcaagcgccacgcagtcgacagccagaactgtcgtaatcgaaagtcctaccgccggtgcaagaaagagcaaatccccttttctttccccgtcaaaaaaggaaaacgtcataattccgatgattgagaataaaactagcagcccgatgcttaataatgctgttgccattgtgcctccttaaaacgttacgtttgtatcgctttacttttcctgtatatctgtaatttcctttaaaatctgttccttgattctgtcgtatgaaaaatcttccagtcttctcttctgcttttcaatgatttcttcccggtatgcctgatccgtaatgacctgatgcattttttccgctacagcttccggctccttggtctccaccagcactccactgccgccgagtgttccaggaatggccgtggaagcatacgcaacgatcggtgtctcaaagaacattgcctccaccagcggtacgcagaatccctcatgctcactcatacataagaagagatctgcaattttgtagtaagccagaattgcgttaaatgcaatgtgtcccgggaagatcacatcctctaccccgcatttttttatgacatcctgtaaatactgataatagagatctgtctcctgataattgccgacgagaaaaagtcttgcggtcggatcgtatttctccttgtatgccgcaaagcaggcaatcacgtcctcaaacttcttgttcggcacgatccttccgacaaacacaatattcgttttcccgtcggaatagcgggttaccacatccttatccggctcctgctcataatctttgaacggaatcagaatcggtgccactgcgatcgggcactgataccccatgtcgatcagatcctttttattgaaatccgagacaacgattccgtaatcgatcgcatccttcagatccgcgatctcgtccagtccctctctcgtcaccttctccgcgccctcatcatatccgcgaaagaacgccggcggagttacgttgtgataccgcagcaccactttacagggcgcctctttgatgatgtcggcgagttcatctgccgtcgcatagtgatagataatcagatcattttcatttaattccggcagcatattgatcagatagacgccttcgtccttgatctttggatgaatcgccagtgtaaaaattccggttatgtagccggcctcatttaaagctctggcaatcgcccgcacatcatttcctaccgcatctccaaagttcagggaggctacaatctgaataattcttggggttttctgatacacgtcaaacagcgtgctcatacctatctttctatgaacttccgacatttccacctgcagttgctctacagtcctgcggagtgcgtcgttttcttccataagaatcgtatgcatgcggtcataatcttccagcacgttcgtgatggtgtgattgcattccctctgctggacaaaatacggctctacaaaccagcgcacaagctttcctgtaacatatttatagacatgtaaaaacttttcgcgcagggtatggtttggtcccagggtcgtctcactgatgtttcccaatccatatgctttttggatatttcttctcgacaggttctggtttgactgtaaatcaaaccggatttgttccggtttccgcatcatacatctccctattttacttcaatattttttacaacgacatccgctccggtgccgttcgacaatacaaattctatattttccgctcgcgaatccaatgtaaaattcaaaaagtttttgccattggaaagctgcgcttccgtcactcttacattgcctccatcttttgtgatggcaatcaccggccggttttctccctcataggacacttcaatctgaagcttatagtgcatcgtcggaagcgtaatatacggtccatacatgacgccttccggatgaatcaccagatagtcctcgacacgctcgcacgctccgcttgtctgcatccgcggcagataattttcatgggtatcgttcacgcccgccagataggttagcagctgggactgttttaattcggtctcgaagcttccgatcggttctttcttaagatccgttccggtgcatgcgatccactccccgtctttcgtctcgaattttaagatggcatcctcacagattccgcccacggaatagtgaatggtaagctctttttcattcaagctgacattctttatcttaaactcggatttttcgatctgttcctttttctcttcttcttttcttaacttatcctgttgcttctgctgttcctctaagagcgtctttttcttttcctcattcgacttgacgcccatatactccagatacttcgcgtcaacttcctgcggctttccttccatgcggatctttcccttgtcgatccagatgctgcggtcgcagatgtcttcgatctgtcccatgctgtgggacacaatcacgatcgtggttccgtttttcttgatgctctgcagtttttcaaaacatttttcctgaaaatgcgcatctccgacaccgagaatctcgtcaatcagcagaatatccgcatccacattgatcgccaccgagaacgccagacgcatatacatacccgaggaataggttcgcactgggttgtcaataaattcctccagctcggagaattcgatgatctgcgccacacgcgcatcgatttcctttttgctgagtccgaaaatggatgcattcgtatatatattctcacgcccgctcatatccgggtgaaatcccgcaccaagctcgatgagactggatactcttccccgcatctcgatcgtaccgctgtccggatagataatctttgtcagcagttttaaggtggtactcttgccacatccgttatgtccaatcagaccgaccgcctctccccggcggacattaaagctgatcccgtttaacacccagcggttctcgtaacggtttctgttgtgaaaaaggattttttccttgagctgatttcccttatcgtaaaataccttgaatttcttcgttaaatctcttacttcgattgcattttccggctgcatgattctacctctttacttcctgctcttttccaatacaggctgcgcacttcgttttctactcctcgtgtgccacctgcttaaaataattcatatatttctcgacgatcacatcccaggcaaagttatcaaggacaaactttcttcctgccagtcccattgcttttgccttctcggggttttccaggtagaaattgaccgccccctcaaactcaaaataattgtcaaaatacagtccgccatgcgatgtgattgcaaagtgttttgtcacctcgcactgctcatgcacgagcaccggtctctcacagatccagctctccatgattaccagggaaaagctctcatgcgtcgacggctggcacagcacggttgctgctgcataagcgtcgaatttgtcttgaacatccacaaagcccagatcgatcacatcttttttgatatcctccgggattttcacctcgccgccgccgatcaataccagcttcatgtcattctggtttctgtacttatattcgcggaaattattgatcagggtatagatatttttcccgacgtcttttcttcccgcatataaaataaacggttccctgatgttgtatttgtcgcggaagcgcgctgcatcataggtatactctgtatacacgccctctccgagcacctgtgcattcacattggtcagatcatagacctgctccgcgagatcgccttccggcttcgcatggaaaatcatgcccgccactttggagaattcccgcttgaaagacttcatgtatacatagctttcatcatggaagcacggaattaagaccgccttttcatagcactcctgtattccatagtaggtcgttccaaacatatacggaatgaacacaaacaggctgtactcatccttgtgttctctgatatatctgtataatgccggactgttcaccatctcacggttgaaaatttcttcttccgcctccgtcggcatctgattgttcataagcttgagattcacctcgttgaaggcatccgcatcccgcttgcgcactttaaatctgcgtacggtaatccctttttccgtggttgtcccctctttatgataattgcagttccagtttgcattaaaattctgaacacatgtcgataaaatctcgattggcacgcctgcctcatgcagatgcagggtcagcccctttagctctgcctcagcgccgcccggaatatcaaatccaaaccacggtatgacaaatccgattttcttcataatcaatccctcttgcctataaactctctgataatttttaaaaatgtctcttttaccacacggttatcaaaatccttcagacggattctctgattgcgtatgatcgtctccctaagcttttcgtccgtgacgatacggttgatcatttccgccgccaccatcgggtcattatccggaaggagcacgccgcttcccccaagtgttcccgcaatcgcggaagtgtcgcgcgcgatgaccggcacgtcaaaacacatcgcctccaacagcggtacacagaatccctcatgctcgctcatgcacaggaaaacatccgccactttgtagtatgctaaaatctcatcaaacttaatctgtccggtgaagagcacatcttccagatcaagcgcctttacataggcttccagctgctcatggtagcggtcaatgcccgcataggagccgacaagaatcagtcttgattttggattgataaattttttatagtagtaaaacgcatcaataatgtcttcctgttttttgtttggaacaacgcgccctgtaaaaaggatattcacatacccgtcatccccgtatttatttatgactttctgattcggctttttctcataatcctcaaacgggatcagaatcggaagcactttgatgtcgcaggtataaccgtaacggatcagatcctgcttgttgtattctgaatctgcgatggcaaattccgccaccggtgccagttctcttgcctcccgcagtccgttccggcagttcagataggctccgtgattatatttttgaaaatatttttccggagtaatattgtgataaagaataatttttcttccgccaagactctttaacttttgatttaattcgtgaccggtagagagatgataaataataatgtcatcttcttccaccttctccatcatatcaaacgactgcgccgttccctccggcaaacgctcgtcgattaccgcagcgtagatctctgtctgatagcctgcctccagcagtgcatcttttaatgctctcgtatcgtttccaacagcatcgccaaaggcaagtaccggtaatatctgaaaaattttcatcgattattctccacacttttttctaattcagcaatgcgctgttccaacatctcgatcttcttctgcatctcgtcgtaatcatagtcctgttcctgctcgaactttgcgccgatctgtaccagtgccgatgccgtatactgattcaactcgttctgtgcatccacaatcggagcaatcaggaatgtaacacattttcttatgaatctcttgataaagacaactactttatttcccttaatcggattccaccacggaacgtatctcttcccgtcaacctgctcaagcgtcgccctaaaattaggatagtcataataatcctcagcgcccagcaccgcactcgtgttcatatccgcaaatttcaaatctttctttgtatatccacgctctttgatctgtgtccggatctcactcatgattccttctacatccacaaattccatctgctctaccattgtatgcctacctccattatcttctctacagttcttccgcaaagcctctctgcagctttacaaatacaatttctccgatcaccagtatcacgattccaagtacaaccgcaacagccagggtgctaagctgcggcgtcgtcttatagtatagaatatctctataggcattgatcattggcgtcatcggattcatattccagatttttaacatgccggcaggcaatgcctcctccaccatctcctgtgaatacatgaccggtgtcaaaaactgccacgccatcgcaacgatgccaagaatatatgccagatcacggaaaaatacggtaagcgcagacgtcagaagcgcgattccaagtccgagcagatactccacaatcataatgatgggcagatataacagtgcccgcgcgttcattccatagcccgagacaatgagtaccgcaaacaccaccacaaatgtgagaatcatgttgacaaacgcactggtgacataagcgatcggcattacctctctcggaaaataaatcttctttatcatatcaccggaattcaaaatgctcgtcgcaccgccagtcacgcaggagctgaagaagatccatggaacaagcgccacgaaaaggaatagatagtaatcctcaattcccgatctcataatcgttgaaaacaccatggtatacactaataactgtaacaatggatttaagaatgtccaaaaaaagcccagaacagaacccttgtatcttcctcgcagttcttttctgaccagactgaatatcatctgtctataatcatagatctctttaaaacgtttcatgattgacccctttttatagttttacaccttatcatatcaaattcccccggctttttcaataaacttaggaaattgccggtatgtctcgttttctttgcttagttttcccggataattttctcgataatctgtaaaaatcgggctttgaccttctgattgtcaaaatcctgcaaacgtgtccgctgatttttcagaatcttttcttttaatgcttcatccgtcaatacgcggttcaccatctccgcagccacgaccggatcattgtccggcagcagaacgccgcttccaccgagcgtccagccgatcgccgaagtatctcttgccacgatcgggacatcaaaatacatggcttccacaagcggcacgcagaacccttcgtgctcactcatgcacaaaaacacatcggcgagacggtagtacgccagtatctcatcgaaccggatctgtccggtaaaaatcacatccgcaagcccaagtttccgggcaaaaagttccagcttctcgtggtattttccaacgtccacataggaacctgccaaaatcaggcgggattttggattgatatattttttatagtaataaaaagtctcgatcacatcttcctgctttttgttcggcacaatgcggcccgtaaacagaatattgacataatcgtcatcatacctgcgaagaacaccggcgttcggctttttttcataatcctcaaacgggattagaatcggcagcacctcaatgtcgcacgtaaatcccagacggatcagatcctgcttattgtattccgagacagcaatcgcatagtccgccgtctttgccaggcgcttcgccgccttgattccctgcacgcagttggcacatgcatcccggttatatttttcaaaataacgctccggcgtaatattgtgataaataattacctttttgccgcccagcttctcgatctcataattcagcctgtggccattcgacaggtgatagatcacaatatcattggctgtcagcttccccagccgttcaaacggctgtgccgttccctgcggcaggcgctcatcaatcactgccgcgtagatctctgtctcgtatcccgcttccgacagtgcatccttcaatgcacgggtatcgtttccaaccgcatccccaaacgccagaaccggcaaaatctgaactatccgcatgttctattctccacacttttcttctaatcttctgcacttttcttccagcgcttccacctgctgctgcagttccataatcctgaccgcctgctcatcctgcattttggcatacagctgcgccatggccgaggttgtgtaaaaattgaactgattctgttcgtcaatgattggctccacatagaatttgatcatcttacggatcattttcttgaaaaatacagacagccggctgccgtcgagcatccgccagcaccgcacttttctggtgtgcttcatatgatcgaccgtcaccccgaactgatccagttcaaaatagtcatcgatctgctcgtgcacttctccggtccctgtctctacttgtacatcttcaaattttaattcgtttctgacgtaaccgcgctgttgaatctgtgcctggatctcctgcatgatctcttctgtgttaatctgttccatcctgtccctcattttatacaatgtatgctgtttactgcgctgtcttctgcgcatcatctgccgcctgcaggatcggcgccagccgctcctttaacagcgccgtgatcgtctgcgccccaagcacctcgtttattttcgtttttccgttctttgcaagtctgtcataatacgccggatcttcatacaaccgccgcatacagccggctgcctcctccacgtccggctctgcccaccggcagccctttttgtagttgccagacgtctcctgtatctccactttttggaatgataccatgcaggcgctgtccgcatccatgaattcggtgttcgacgaccagttcgtcgccacgcagaccgtgtcaagcagcatagcctccgccatcaccagcccgaagccctccgcgcggtgcagcgacacaaacacatccaccgccgcaatcaggctgttgaccttcggcttgtccaaaacctccgcaatcagatacacattctgatagcccttcgtctgctcgcgcagcacctccagatcttcctgcttcggattgttcatcttgatcaccagtccgacatgttcatcctccaccgggaacgctttcttataggcatcgagcgctcccactgggttcttgcgcgccatggtgctgttggtatcgtacatgatcagatataagaatttgtcctccggaagtccaaagtccgccctgccgcagttttcgtcttttcctgccgtcacgtaatacggcagcgtgtacacgggcttgtccgtcaccttgcggatactgctgcttgcaaattccgagggcgtccagatctcgtcgaaaaatttgattgcctcctgatattcctgcgggaattcctccagctcccacagccagaatgcaatgttgtaacggtctctccagatgtccttattcagatacagatacgccagtcctacctcctgcggattcacatggaacagattcacccggtaaggatagtcctcacgcatccggtgttcaaagctgtgatccccgcgccggacattgccgtcaagctgaaaattataaattccaaacgggatctttgataattccagttcattcgccagcagacgcatgctctgccccagaccgatctccgcccggatgtcgccaatcagattcacgcccgcttcttttttctggtactccgccggatgaatcggctctttctggtactttgccatcagcctctttaagtaggcaagctttgccgcccgcaacagcttcttcggaagcaacttctttaatttctgcttatgatctgcgataaaacgcaccattttttgtttcatgctattttttccctatcgtctccaagaattcttttaatccgcccgccaggcgctcctttttgtagcgtccgacgaccgcttcacacaggctatccggtacgctctcttttccggcttccccgatctgccgcatcgcagcggcaagctgcggcaccgcatcctctgtgtccagcttacagtagcacaccgcatcgcccgcaatctcatgaaagatcggaagatcactcaccagaaccggcttgcggtaggtcagcgcctcgatcaccggcataccgaagccttccgccctgctcgggaacaaaaaggcgctgcatgcggcatacatccggtacttttcctccgtctccagatacccctggtaacagacgccgtccgtctccttctggcactccccgagtagcgtctcgatcgcatccgaccggatctttcctgcaaggtacagcttctttgtgccgccgtccttccggtagcgcacatacgctttcagcagaagatcggttcccttccgctcttccagattgccgatatacagaaaatatccctcgtcgcagaccggcagagaaggcctctcctcggtaatgatataagaaatacaggacggaagcgcctttgccgccggataatactgttccacctgcgtcttcgtatccagggaattgtagatcaccgcgtccatgtggcgaagcgttttccccagattccacttgaaatagtatggataaagtctcccgtatccgtacggtgccgtgatcggaaaaacatcatgcacggtcactgccgtctttccgtacgggttgcggatgaccaccggcgtcagattgtttacttcccagaacagatccggttttacctcatttattttgttctgcacaaaacgaaaataggcatataccccgatacttttttcgacaggtgtcccatatcgatgtatcggaatatgtgcctcatccagctctttcatcgccgcactttcaaccacatccgtaagtaattccattttcatggtatcatactgcattaagccacagataaaattgtacaggtacattcccacgccgctcgggcgcttcccgagcgttctcgcatctatcagaatcttcactttttccctcttgctcctgcatatttcttacatccggctgccgcataacagcagaaatagtagactgccttccatacgggaatccccatatagcggtatacgccgtaggtcatccgcgctgatttgcccttctttctggacttgccggtctcgcccagcctggattttaataaaggctcgtttacaccggcaaaggttttcccgtcccttaacatggacagccacacaatgtagtcttcgtgcagctcatcgtgtgtcatcggatactgcagggcgtcctccctgcgcatcagcacggaagaacacgggatgacgttccccttgagaagtccgtgatacgtgaccgtctccggaacctgcacgatcttcgtggtagagatcccgtcggcgtgcatcagttccctgcccgcatagcaggcgtctgcctttgtctccgcaagccgctttagctgacgctccgtcttgtcctcctgccaccagtcatccgcatccaatatcgccacatagggcgtcgtggcacaggcaaccgcacggttgcgcgatgccgccgccccggcattctgctcgttttttagcaccgtgatccggtcgggatactcttctgcatagcgcatggcaatggcatacgtgtcatccaaggatgcatcgtccacaataaccatccggcacggcacggtctgtgccagcacggactgtatacaattttcaatataggatgcagcattataagctgcggtgattgccgtcacctgtatcattgaaatctcctaatctttcagtgccgtctgctgcgtttcatccactccctcggtattctccttctggaagagaatcttgaacgtcagcagcataatcttgacgtcgagccacagggaatagttctcaatgtatgtgatgtcgaacttcagcttgtcgtacggcgtggtattgtattttccatacacctgcgcgtatccggtcagtccggccttcaccttggtgcggaacacgaactccggaatctcctcggcatactggtccgcgatgacctggcgctccggtctcggtcctaccatggacatatcgccctttaagatattaaacagctgcggcagctcatcaaaatgaatattgcggatgatctttccgaccggcgtcacgcgcttgtcgccctttgctgcaagtctggcgccgtttttctcggaatccatgctcatgctgcggaacttgtagatcataaaaggcttctcatccctggtcaggcgctcctgcttgtagaacaccggacctccgtcgtacagcttgaccgccagtgcaatgattaacatgaacggcgacgcgatcacaataccgatcagtgacagcacaatatcgcaggttctcttaatgatgcgctgatcgatcgacagtccctgattgcgcgataacagcagcggcgtgtcgaacagatggatgtcgtccgctccgcggaaaataatgtctgagatcttcggtgtgacataggtccggatcgactcctggtaacagaacttcatgatctggttcctcgcctgtgccggcagatcgcagagcaccaccgcattgtattcgcggatcatcgggtaaagcttctcatgaccgatctcatagctgaccgatccgcagatattgtacttgtcacggcgcgtattgatcttcgcgatcaactcgtccggcgcataatgtccgtagatgacaagcatctgccgcggcgggtacagcttggcatagagttttcttatgatgtagatccacggcaggatgaagactatctcaactgccataacgccgagcataggtgcgggctccacataatcacggcagatcaggcagagctccagataaccgacgatcccgctcagtaaaatggataaaatatgggacaatgcaatatccgtcatccgcatatagccgatattatacccgccaaataccttcgtaaaaaagaagatcaccagcacatacagtccgacgaccgcccagtttccacggcgccagaaaccaaactgctcctcgtaaacagtgtaccagatgtagccaaagcagaatccctccaccagcagagtgatcagattcgctccgtaatttaatagatgcttatattgctctcttaatctcattcagttcgattcctttgctattattccctaaagtatatcacatatgaaccggctgtgccatagcagtcgtacccggcgctctccatcagcgtctgatcgtcataatccgcttccaggatcacgcagttgctgttatacttttccgccatggcaatctggttgtcgactgccgccggcaccgccacaatgcttgcacagtcactgatgaactgcttctctgtctcatcttcggtcacagtatcctgtgcgatcatccgctcgatcagatcctctccgtagagcagattcaccgaggcgtccagctcgcggatctgtgcgcagaccgcacgcggcgcgatcatattctgtatgtttctgccagactcccgcagcgcatcgtcgagttctgcaatctcatgctccacatggtatgcattctccggcacggcaagctttggcgccgtaaactgaaaactcatactaaccgccacgagcgccgcacacaccagcacgccgagcgctcccgtccacacatgctttgtcccgaccgcaagctccgtcaccgggattgcagccgcgaccgccggaagcagcaggaaaaacattttccagtaagacgtctccatccagaaggtgctgatgtcattgtatccaaacggattccccacaagtaccagcatacacgcggcgtaggccgtatacatgcggcacccgcggctaagccgcttccactctgccatcagaaagagaagcgctgtgagagccagtaccagactgatgcccccggtcccgaactgccggaattcactttttaacagttgatagactgcctccatctctccacctctttatcagtgccgcagccagagccactccccacacaaatgtcacaaaaaagaatcctttttcatacaacagctgtcccgcagccgcactcaccacataatacagaatcacatacggctgtccgaacgcctcgatctcccgcagctgcttcttctcacccagagcaaggagcaccgtaagcgggagttctcccaggaagaaaagcgtctccccgttccagcagttctgatataatccaaatgccacagaccagtctgcgatcagcgaaaccgcatataaaagccacaccacgatctgaaagcaccattttttcttcgtgtcatgtttaaataaatattccgcccacgcggcatacaccgccatataaaacggaagtaaaaacaccggcagcagaatccggacgaactttgccgggtgcagattgctcattctgacatacacggcatagtaagccgcaaccggcgccgcctgctgcgcatcgagcatctctttctcataatccatcatggcgtcacggcttttccctgtcatggcgtcatactcatacagcgaatccgtcatgtacatggtcatgacctgctccaccgtatgctcgtccgtccggttcgccgcaaatccgcccgcgaccgcaaggataagcactgctgcaactgctgtgaaaagcaagcttgtcctgcttttgatccggatcagctcgcgcatatgccatctataaattataacgcctgtcgacaggattgtcaaaacagcgagcaggacgcaaaagaccttcgtcagcttcgtcaacgtccattttccgtcgagtgcaatccgcgccagcccgtaaaacagcgcccagatcgtaagactcccgatcagatacgccgaccggcgttttcgatactccctctgcgggaacagtccgaacagacacccggtcagtatcggaagaaccagccacacaaaagcgagtatcactgttttcagaattgtaagcatcttccccgtccctccttactctttcgcacaccggtatacttcatatccttccaccgcgccgacataggtgagatccagctgctgcaggtattccgcggagtaataccgggtgttgcgtacaaaaaaatccacctggcgctctgcaaaaatctcgttcataatcgatgcgtcaacctcgacacccttcacgaacagggaaaccgccgtgctgtgatcgtcatactgcccgtccaccggaagttcttccgtatctgtgaacatgtagcgcgccatctccgtattgttgaccgcctcgatcacggtcggatcgtactgccttatgctgctgtacatctcctgatcgacaagaatcaccggattctccttcttggaagcctccgcaatcagttccgacgtctcgagcacccaggaatctattttgtacacgttttcatccggaatgtactttaccagactgctcccgcacaagaacacgatgccaagcaccaccaccccgacggcgaactgcacttctctctttgctttgcgattcacaagacgcgccagcagataggcacacagaaattccgccggaagcagccagtaaaaacgcatatagcgatcctcccatcccatcttctcgatgatcggacgcatcaggaacggattatataccgttgccagcagaatcagaaacggccagacaaacagttccatcagtttcttatcctttttgtatacaagatacaccaggcagcccaggtacggcaccagatacagcgctccgttccaatatttccaaaaattctgataaaagaaatctatttccgccattcttttccctcaacctacagaaaactcagcacaccggcagccagacacggcagcaccgacagcaccgcatacccccagtattttaacttcttcctgcgaagcagcactgggaggagtccgacacccaaaagcatcggtatcatgaacacgccgctcatcgacatcgtcgccccggcgaacgcaaagacaccgagcatgatccagcactgctttttctccgtctcctccgccgccagcacaatggcaagcagcgcaagcggaagatatacattcgccagcatggatttcgactctgccatgcgcgtccacagataatagcccggaacctcgccgagattccagcacagcacactaatgagcgcacggatgattgccgtccacaccgcaaccgcacggtttcctttggagagacgcagggcaatctcatagaccgccagattggctgccacgatctcgatcacgcccatgatccggttgaccaccaccagcggatgcatgaaaaacagcttcgctaaaaacgcgatcagcatggaataactgtcgtgccacgccaccgcttttcccacatagacgccggtatacgcatcgtactggtacatggtgtccgtgtagagcgcattgattgcattcccgttatagtagctggtatcatagcggctcacatacaactggtttcccatcccataccagatctgaaccaccagcagcacgagaaatagcaacagccacacatcgcgcgcgggataccgcatccaggatccgccctcttttcttccggctctgaccagatacaccacgccaagcgccacggcaatgacaagcaccgcaagtgccgtgtagaaaagcacatggaacgccgcaccgcccgcctcggtgaaaatatccacaacggagaaaatcccgaggaaaagtgccataccgaacagccacaaaaagcccggcccttccttccgccccataagacggcagactcccgcccccaatatccagaaaatgcaacttaacaccaccagtccaatgacgatccccaaagcagaattcatacgttttttcctttttctattctctatgccactttataacttcatattttccggtcttgcacaaaatatccatgtcatcctcgaagccatgcccggatacccacctctggaaagtccttgcgtctgcctttgtgttcgtaatcagaattgtaatatctttctgctcaccaatcagtgtatctgcaagcaatgcatccagtttctcttctccgttcgtcaacacataaacgctctcataacgaccgagtaacgggaagcactcgtacccttccgcatgctcccggatcagaatcagtcgatctgtatctgccgcctcaagcgccgcctcaacctgatcgctcacccgcacttccgtgttcttattatagtaagtatacaccagactgctgcaggtgaaaaccaccgcaagtatcgaatataccatcttgattctgtgaggtctttgggttgtctctgcaaagaaattcaactccattacaatcacaagaaacatcaacggatatgccaccttaaaataaggaaaccgggtggtcagaacaatcaatgcacagtagcctgccagaagccattccagccagaccagccggttatcttttttctccgcttttctaacggatcgaacaagatttataacaaacaaaatgcaaaatcccgccatccacagaacatttccgaacaccgacgcaacaaatcctgccgcactctccttaatcgcctgtgccggtgatgtgccagttcccgaaagtttcgaaaacaaccccagtacagacattggatcaagcagaataccgattccgaccgccagaataccgcagatgagatagcgcctcgtattctttttccgctcctgccctgttaaatttttcttcagccagaccagtgtcgcgataccaagcacaactgcccagactccagttgtataatgtgcaatatatcccagcggataaagtaccagcagccccgcaatatcccgccgcacggctttttccatgccatcccgcatcgcctgatataattttaaatgcaccagcaaaagtgcgagttgaaatgccatggcaagcatataagcacgcaaatatgtacttaaatccaggcagcccaccgagcacccgaacagcaggcacaccaaaagttgtctttttgtatccgcagtaaagtatccggcaatgccatacagcaaaagtaataccgccacaagcgccaccgcattgaccagaaaagcactccattttgttgcactgatcgcagggaacagtgagccagacagatgcaccagttcataatacaggtaggaattggcatcatcccccatcgcattcaagtagacatcccccagatgtaagcgctcatcctcacgaatcgagaaccagtcgctgatctgctccttcccataccatccgcattcctccggtctgggataagaaaaataagcagcaccacgcctgttttttgcaagatccattccaaaggcggcaatgttttggatcgtctgcgccacagagtctgtgagaatctcatcttcgaaatatgcacggattcgtccggtcgacagcatccatcctttatccgtactgttcgccatgccataggtgacgacctcatccccgaccagataacagtcaatcgccatatatcctcccgtaatagcaagaatcaatataatcactgccagcagtgccacaccatgcctgatttgcttttcatctgttttcatatgttttccctttatccatagtttctagcgattttgtaaccgttcaagccctttgtgcagcagctccatcacggtgtcgttccggaaaaggagcagacagccgaaatagaccgctgccgccgccgcaatcagaacgaacagcatgacaggcaccgcccatgacagatgtttgagccagcataccaccgccgtcatcgctgccagcgccgcgcccagactgatgacatagttcctgccgatcgcaaggtgatagctgcatcttgcatgccacaccagcactgtggtcacggcgatctccgacagaacggatgcaatcgcggcaccgctctgctgcatggacggaatcagcaggaagttgactgctgcattgattaccgcccccgcaatcgttgcgtgaagaattttttgctcctgcccggttgcgatcagcacgatgtgtcccaggaaatacgccaccgagaacaccagcaccagcacgctcaagatccgcagtgttccgatcgacggcagaaatgcctctccgaacagaaacggcacgatatactctgccgtaataccaattccaaccgtacacggcagtgccagaagaagcataatcttaaaaccccggctgagcagttcgttgcatctgtcatattctttctgcttgtagtgatagctgatgcgcggatagaaaaccgccacaagcgcgatcaccaccgtgtaggtcatgcgcacgatcttcaccggattggaataatatcccacgcacgtctccccgtggtaatattccagcatgatggtatctaacatcgtgtagatctccgtggcgatcgtggacgccagcagaatcagcaccggctttaaatgtctgcccggatgcagacccacgtccggttttccgatatatttccgcagattccacgcgtttagcaggttgtttcccgccgtcgccacgcagaggataaaagcgtagatcacataatcttttgccttctttacaaacagaagcatcgccacaaacgaaagaattttcacgatgatgcttctggtcgcaatataactgtactcctccataccctgatagaaccagtcaatgttaaaaatatttaaaaccagcatcagacccatgatctgaaacaacagcttccggtccgcaaaatgcggaaaattgtccacaaacacatagtacgccacaatgcacatcagtgtcgcggcaagattgatgaaaaacagttcccagaaggtgcggcttcgcccctcctttgtctcaccgctctgcgcgatcgcctttacgccataggtcggaatcccgagcgacgcaatcagcacaaaatatgccacaatcgtgttggcatacccgacgcggcccacgcctgccggcagaagaactctcgagatataggaagtggtaataagcggaaaaagggccgtaaagcccttatagatcatattaaatatagagttttttaccagtgatttcttctctgccatacgttcttcctctatgattctgtctatcccagccgcccgaggcggatcagaagttccctcttccaataaaacacattccggtgccagaccccggttttactgctgccgcacacggtcctgatacactgcattccggcgtagcgctttgccagccggcggaaattctcgttgtatgcgtgattgatatgccccgtcgagtgatggatcagcgccacgtcacagacatagacgttcccgccgtgccatctggtatgcagacagcgctccacgccgtacagatgccagttatcacacagcttttcatcgaacggattctttttgaaatgtgccgtgtgcccgccgaaaaaacattcatccagcgaatcgcacgccctcattcccgaaaatgcctgctcgccggctgcggcaagctctcctgcgccgtgctgtactccggataaaacgattccctcggcctcgccaaaccgcttcttccttcccggaatcgtccccggcacaatcccggcaacgcccagcagatcctccttcccggtctgcgccaggtatccggcaaaccgcgcgagcgtatcctcccctggaagttcgacgtcctggtgggcgtagatcacatactccgtctccacgcgcgccgtcgcggcattcagtgcaaggctgcacgatgcatactgtctgctgcagttgtccatgccgatcagctcatacccggtattctgttttgcaagggacgcctgcagcctcccgtattgtttcctgtcgttgtagcagcagacgatcgttatcttatttttcatattttttcatcagaccgagaaacgcccggtacgatttggtgatctgtgtatagtaaaaaatcttggcatcgcatacatcgctgtacagcttccttgtcgtcacagcctctttatgaatgcaggtgacctccggcgaatacagcatccgcagtccgctctttgccgccagatagtagagaatctcctcctccgcatacaaaaaggtgccttcccagaagccatcatacactttgaagaaatctcttgaaaacacaaggcagcatccgtggagcagcactccctcgcgctcctcgccgactctgctgtccgccgctaccgcctcgccgtccacctcgcgggtcgctccggtgccacgcgacagatcgcctccgttcttcttccccaagaacagcttggacatccggtagctcatcgcccggatccaggatgataagatctgctttcgcatatagttcaaggtatagctgcgcttctccgccaccgggttaaagtgctgcgtgcgggtcgcgtccacaacatccgcgcccagtatcgcatacggctttctgtcgtagatctcaaacaggcgctcacaaaaatccggctgttcaaacaggatgtcactgtttgcagcgacgatcagatccggatcatagtgctctctcgcatagcggatgccgagattgttccctctggcaaatccgagattctctcccgacgcgatcacgcgcacccgtttttcatcgataaaatgttccgcaagccactcctcgctcccgtttccggaaccgttgtccacgatgacaatatgcatgtttttccaggtctgcgtcgaaaggatcgactctgcacatgcggcggcttcctcgtatgttttgtaatttaagatgacatagcaaatcgttctcatcggcactgtctccctgaattcttatgcgcccgagtatctggtcttcgtgccaaggataatgcggacatacggggtgatggaacgcacgattgccgttccgagtccaaaatacttgtgcaggaaatggaaccagtcccgaaacggcagtccctttctgctctccttgagcttaatgcgctgcatctttggcagcgactcgtcctgccaggttcccttcaggctgccgtcgttgcactgcccgatgaacttcgggaaaatacggatctcatatcccatccggctgatggcgagtccgtaatcaaaatcaccgatactgtgctgataaaacgggtcaatcgacactttcatgaaaatgtcatgcggaatgatcgcgcagttcgcgttaaacgtgtcaaaacagatgtcctgcgcctccgggccgtattttttgtacttgatgcccttgacgtacttgatgccgccgtagctcatcctgccgtcatccccgcacatcgccccgaccatgaccttatccggtgcaaacaacgggagcatctcgtcgaaaatgcccggcacaaacttcgtgtcatcgttcatcagcatataatactcgtaatcgggatgcgcttttttggcgtgctcgatcgcctcatacatgccgcggttccagaacagtccgccgtcgccgttgattaaatcgatctcatacggcatcgccgccagcatctcatccgtgccgtccgtgctgccgtcattgacaatcacataatcaaaggtgacgtttttgttctgtccgagcagttccatactctgcctggtcagctctcttcggttataacaggtaaatatcgctaatactttcatctgattctctccacgttctgcactctgtgtcttgctgcgcaatcctatatttgaccgatatagtttctgcgaaacacaatgtgatagatatgttttaacaggttcggctccgattcatgcagcagcgcccgcttcatcagccggtgtacctcgggacgctccgccacctcatccgggaattccgtgaccgcgtgatccgtcgccagatggtggtcaaagaccggttccctgctctctccacagtgaacgccgcttccgtcccatccctcgttgctcaccagcgagcgcagcggtgagaggatgtagccgtcccgtttaaaattcgtccagtaccagcggatcgcccaggaattcgtccccgcatccgtctgctggtccttcataatcttatagaaattgtaagtgttatcgtaattaaagcggcggcgcagctttgcatcctctttcatccgcgtccagtcgctgcatgtcgcatcaaaatgccgccaacggtctgcccaggtcgcccatgaccagcttgtcccggtcagcgtgtgaaaataggattcacacggcagtgtgaccgtatccgcaaaatgggaaaaaccggtcacaccggtcaccttgggattcttctcgtagcgcgagagcgcatcattcataaaccgcaggaaatagcggttcgtcacaagatcatcctccagaacgatcacggtaccatagcgctctatgatctccgtcacaccctcgatcacgtttctggcaagcccgtaattttcctcccgcgcaatcagcgtcactttgaaaaagccgcctgcctgcgccacgtagtcgcggatttcctgtactttgccccgatccgcctctttttttgccgcgtcggagaacacgaacagttccgtgtcctgcgccagttcatttttcgccagcgcttctatggtgcgtctggtgtgctccggtctgttgtaggtaaataaaatcaccggcgccgtttttttctcagccatgtctctcctcctgccgatgtccgtctactcctgctctctcgcccattccacgtatgcttctatgccgtcggaaagtgccatgtgtttctcatatcccagctttttcaacagggagatatccgctctccagttgcgcgggtcgccctccttgaccatgccgttaaaggatacgacgtccgcatccgcgcccagctttccggcatagatctccgccagctcgcggatcgatacttcctccccgttcgcgacattgatgacgttctccggtccgtcataggcaaggatcagttcgatcgcacgtacaatatcggagacatgaatgaaatctcgcgtctcctcgccggttccgaacagttcgattcttccggtgttctgatatttctgatagatgtcccacagcagctgcttgcgcagtccgttgccgtaagcagaaaaaatacggatgctgcggatgcgatagccgtgaatccggttgtaatactcgcagagctcctccgccatgtgcttgtgcagcccatagggggacatcggcgccgcagcgtctgactcgcgcaccggaagctgtctcggattgccgtagattccggcactcgagaggaaaatgatctgcggtcttttttcaaatgacttcaatgccagaagcagctgatagagactgtgcagattgccatcgagatctgccatcggattgaccaccgaagccccgacattggcgcttcccgcgcagtgcagaatcacatccggctgcacgccggtaaagatcgccgccatctccgcggactcctgcgacatgttgcactgatagtaggccatggtgtcacccggcagcctgtctccgcagtaatttgccgccagatccagccctgtgatctcgtattctttttcaaaatattcctttgcgtgtcttccgataaatccgttgacaccggttatcaccattttcttcatattcatcctccggcacaaggccatcttccattacacgaaaatcttctccaatgccttcgcgtactctcccgcctcgcggtacatgtttgccattcccgccatcatatctcctgcaaaataggcagcttcttccggccggtctgccctctctgccgtcaccacgatcagatctgccagtgcatccggatcgtgcggatcaaagagtgtgcatttttcattcttctgctccctgtgtaccggaatgtccgacaacagcactgccttatcaagcaccttggcatcctccagcaccgttccccagccttcgcagagggacggctgcacgataaagacggcatttttcataatgcaaagctgctccgtgcgctccacaaagcccagaagccggatgcttcccgccaccggcgcagcctccatgaccgcctttagctcattgatgtattccgggttgcggtagtcttccagattgccggtaaacacaaagtcgtaatccgcgagaagtccctgctttttgatgcgctcgatcgcgcgcaccgcgaccacatgattcttgtgcttccagaactggttcggcagatagacgtactttttatgaagtccgaatttgtccgccaccccgcgctctaactccggcgtgatcgtgcgcagttccggctctatataggagacaaaatgcaccacctgtgtcctgcatttatgttccggataaaaacgctccagatcatggcgtgcatcctcactgcttaataccagcgtattcgtaagttctgtcatcttccggtccgtgacgtccttgcgcgccagttcctccggctggaagaattccggcagcgtcttgtgctggaaatccgggatccagaaaatgccgcgtgaggcaaacagactgccgatcttgttgagttccagcgcgtagcagtatttcacgccatgcagccagatcagattcatctcgtagagcgccagctttgccttgttcgttccgtcgtagatatgcaggtcgatgcggttcccaaagcaggtaaaaatatccgcatgtgcggagtcgatcaataccacaatacggtattccttttttatcttctcactctccagacagctgaatatgatattttttaagtagtacaaaccgccgatccatccgcggtttccaagtccgttgaacaatatttttttcatctgacagcctttcccatcacatagcagagagcatcgatacagccctttgccacctcttcaaatgcaaatgcatgcgcgcgctcgtagctgcgcgttcccatctccttaagacggttttcgtccgcaaaaatctgatcgatcttctctgcaaacacatgtgtatcctccgggtcgacgatgtagccgttctccccctccgccaccaggtcaaacgcaccgtcggcgtactttgaggagatcaccggaagcgacgcacacatcgcctctaagatcacgagtccgaaacaatcctctctggtcggcaggatgaagacatccgcgttgtggtacagttcgcgcagcggctccccctccacatatcctaaaaagcggatacggtcggtaattccaagctttcccgcctgttccgtaagaagctcccgctcctgtccctcgccaacaatcgtaaggtgaatgtcctcgctcgtctctgccagcgccggaagcagaaggtccagcccctttctctggatcaggcttcccacatacagaagttcccttccgctgtagtcttccttttcgcgcagatatttctgaatgtcgaccgtcagataggagagaaaacatttcttctcatccgccccgtatgcaatctgcgcctgcttcgatgcggtgctgctcgccacgaacgccgccgcacgctttatgatgtaactccgcgaaagccgctgcaccttcccgatatttttctccgaattcaaggttccatccgtccagctgatgaatggaatccgcttttttctgcaccaatgtaccgctctaaggatcgtcgggttgtattccatggcaaatacaagatccggctttatttccgccagcagcttctccacgccgaccggaaggaacacataccggtcgtcaaaacgcttgcggataatcagtgtctttgatttcaagaaatggtaatggctcagttccgccagttccacactccatttgcggttctccatgcccgccccggaaaaaatgatatgaaattcatactccggataatgcttctgcagatatgcaaaaaagtccacccggtacggcgacggaatgttcgtgataaatacagcttttatcattttgatatatcctcataaatcctgatcagtttctggtaattgtcctccgggcgaagacgctcggcataaaaggctctggcgttctttttgagcaccgacagatccatcgcatcaaacgcgctgatcttgtctgcgagatcctccgcggaattgtaggtaaacttcacaccggtaatgccgtcctgcaccatgccgtccatgtttccgactcttcccgcaatcaccggcacgccgtaggagtacgcctccgcgatcgtcatcgcaaacgcctcgtagcactgcgatgtcatgatgaccgccttcgcctgatagaacttctccgacatctcgtccttctgcagatagcccagaaactttacattctccatatgatgttccctgacatagcgctgcatctcttccatcatcggcccgtttcccgccacatacagcttcttgtccggcagtttttcaaaggctctgactgcaatatcgattccctttaaggcttccacgcgcccggcaaacaggaaatattcttcgtccgagcgcacctcgttcggcacgatctcctccgcgaaagtaaaattcggcttgatgtaaacccgttccggattcacgatctctttctttgtatccagcgattccaacagcttcttccggttgaactcggtcagacagataaaattcaccctgcggtatgtccccacaaaccggtgaatctgcaggatggcggcgctgacaaaagactgcagcttgctgttccggtagcacttgtgccggatggcgcagcccattccgtgctgcacacactcctcgcagatcacattgtcccggaaaaaagatcccgccggacagagcatgcggaaattatgcagcgtctgcaccaccggcaccttgcagcggaatgccgcgtaaaagacggacgggctgaccatcgtcagcgtgttgtgtacatgcacgatgtcgatctggttctcccggatcagcttttttacctcgcggtaagtcttaagcgagaacaccgcggtaaacggcaggaacagctttcccacaatgcccttcttcgccagctcgctgttggagcggtagtacgtgtagaccttgtgtccgtgttcctcgagcaggcgcttttcattgcgcaccaccacatcttccccgcccgggatctgataaaaattgtgtatctgtaaaatgcgataattcttcatagacttcctcattccgccgcacatacatcatcccgcttcttctccagcagatccggatagagcagaattccgcacagcagcacaaacggattcataaaaccattcatgataaactgttccagcacaccgtaaagtgcaaacgccgcgatcatgaccagttctttgtaatagccgccgcggtaaagccgaaacagcgttttcgtcacacaccacaggaaaaacagcgccacaatcgcaccgcagtacaggaacacaaacatgtacgtgttgtcaatcagcccgtaatactgtccgtaaaacagctcctgcgcccgcgggatcagtgaaactccctgtgtcttataatagctgctcatgatatagattcttcccgacaccagatggttcaaaagacgcatcacagaattgccgccatcgtagaacagcatcgtgcacagactgaataccgcaccgaccggaactgacagcgcgagaaccaccttccaccggtcctttgcaatcttttcaaaaataatcagtgcccagacaaagaaaaagactgcgattcccgttctgcagtaggtaaatttgtagaacaaaagcgcggttgccgatgttccggcgaaccaccagacattcagttttttataattataatatagcagtagcagcaatgtcaaaaagaccgcaagaaacgccgtgttcggctcattcatggcaaagctgtacaccggaatctccacgtagctgctgtccggcgtcgttttgtaaccaatatcaaagaccccgaacgttgacccgatcaccagcatagccagacagaagacccggatgtacaccgccatctgaatcatcagctcgaacctgcagttcttcatggcaatgatcgtcatgaaaagcagcagccacgtattctgcttcgtaatcacggagagcccgagtccaagagccagcagcaccgcaatccacgcaatctcacggagcgtgtagcgcgtggtcacaatcttgatcgcccagaagctcatggcaaagataaagaaaaatttgtatatattatcgccgtgatcgtacgccagcgctttcatcaggatattgatcgcaaaatacccgtaaaacgccgcaactcccacgctctcccaatcacttgtccgaaaaaatgtcttgattctatccataccgtcctttctgccttcctgctaccgcgctatgatccgattctggaatacaccgcatatacgtcttcgatcacagcaatcttttcatatccgtattccgtcagatcctcggggatctggtgaaaagaagtattaaacactatatatctgcagttcttatttttcgcaatctccgtgacacgcgccacatccggatgctcgctgctcatttcctcgtagacctgctgttcttcctccccgatgttggagataaagccctccgcatttcttccgtacagcagacatgcggctgcggaatattgtctgacactgcataaaagctcgttcggcacgataagcgtctcctgccagtcaaccagccggctctgcaccagatccgcaatctcaaccgccgcctgcggcagttcgtacacattcgaccgctccccgtaagtctccgccgataaaaccggcttcccggtcacgaagatacagacacatgccaccgccaccacgacaatgcgcagtgcctgctttccaagccggtacgccatccttaccaccgcataggcgatcacgaacgtccacggaagcatccacagcagccgccagtacaccccgcttaagaagcgggttcccacatatttgtagaacaccgggttgaaaaagaaaattcccaccagcaccgacggccagaacaatctgtgccgctcctccttccccaggaagaagcagcagaccagcgccgccgcaaacagcagcagatggacgagaccggcacgtccgccggtaaattttacaaattccccccacaaagccagtacatagcccattcttttactcctacatcaggtaatatcctaaaaagatcacacacggaaccgctgccagccagatggcaagcgtctttctccagttcctgtaatagcaaaaatccagcacgccatagacggcaagcagaaccggcgccgtcacgataccaattccagaaagcatgcatgtgcccacacccgccacatagagaagcggaatccagtgcttccacacctctttcttcatgatctggtaaaacagatagaaaaacagcggaagcgcgaagcttgcgcagactgcctttccctgccagatgcgcagcagaagcatggacgccagcgtgtgcgtcgacgtgtagcccgcaaggtgaagcacggagagcacgattccgaagagaaatgtcttctcccagtctccgccaaacagcacctgcccgatcagcagatacagggcatagcagatcagaatcaggaaaaacggcagatacgcatgcgacaacgccgccggcgccatatttccctctttggcatgcattgcgacaaacatcgcccacggcgaggtcagatctttgcgtacctccccggtatcccagtacatgtagtccgccgtgatcggatcctctcggtacatggtgtcatgtacgaccgccgatacttcctccgccacaaagcgtgagtcgtcatcgtcgctgtgctcgtaacgcgcggggatatatgcctgcagcagaatcagaaccgccacaagaatcccaaagacaatcgtccacgttccggctttcccacacacttttttttgcacgcctgcgccatccgccgtcccagcagccgcgtccgcaaccgtctccgcggtccccgcccgccgtcccagccagatgacaaacgacagcaccgcaaggatctgcagaatgatacgccacagcagaagtgcctgcgtcagtgttttctgcatcatcacaaacggcaccagcacaagctgtgccgcggcgagcattgtcgcaaagccgagcacccaggcgtgcagaagctgactcgcgcgctctcttattttcaaaaaatccgtccacagaagaccgatccagaccggcacgaacacgaacatcccaaccatatagagcaggctcttacagctcatacaccagaactccttcaagcacgattccctgtactgccgcctcattcttaagacgatacagtgtctcgttattcactccgcctcttgcacacacaacaaagttcttgtcacagagctttcctgccgcaaaagcatctgcgctctctgcgacattcgggctgttgatgacaatgtattcataagtatcctgcatttctttcacataggaagcaaaacgctcgttcataaccacgtcaaaattcttctcctcagccacatctctgcacagtacgtccagatagctgttctgcgtcgtcggtaccgggcggctctcgtcacccagaacataacggctgatggaattgcctgcttccttgccctccggctccttgaccagatcgatgagcagggtcttctttttctcatttgcaaagctcatggcaagctttaatccggcatcctttttgaaataaccgaccggcatacagttcacactcacgcccttgtgatccgctccgccctgtttttcttttaaaaacagcgctaatttcttatatacttcctcttcattcgcttttctggtcttcacgtcatcgatgaccggaatatccagacatgcacgcacttcctctgcgctcttcggcttccggtagagaatcagccagaaagtatacagcgctacctccgcaatgattccaagcagtgcacccgccgcgattccttttttcacgccgcccttgaaatcgtcctcagagataaagtaattctccgcttttctggtctcgctgttcggatacggtgcgtccagcacggtaaagcaggtctccccgcccgtgagctcactgcccacctgaagtgtcgcatcaatgatctcctgtgtaaatgcaatggcgccgtcctcatcggcgatgctgaacgttccggtatcaatcggatactgcagatagatcgtaaccatatctcccgcttcgccctgcagcacgtcgaagattccctgatacgtcttatagtccagatcgcatcccgtcttctgctgcacgagttcatacgcgcggtagctctgcgccatcttaatgacattgttcgcgcgctccgtggaggcactggtgctgtagtctgccacatacagtgtagctgtcacctgttttacattttcatatacactctgctcgataaaaggcttcagagatttgtacttgtagccgccaagcaccgctgcgcacactgcggcacagatcagcgccagccaccatttgcgcagattgcactggatgatttccgcaatactgtattccctgtctaagcgatattcctgattcatatgattctccttccttattctccgcccttctcaaaaacaaccttgatcgtttttaagataatttttatgtcaagaccgatgctccagttatcaatatactgtacatccagctttaccacatcctcaaagtccttgatttcatttcttccgctcacctgccagagtcctgtaatacccggcttcgcgcttaagcggcgcttctgatgggattcatactgccggaactcatccactgtcggcggtcttgttccaacgagactcatatctccctttaacacattgtagaactgcggaagttcatcgatgctggtcttgcggataaatttgcccacctttgtgatgcgcggatcgtctttcatcttgaacatgaagccgttcatctcgttctggctctccagctccttcttgcgctcctccgcatccttgtacatggagcggaacttatagatcttgaagaagcggccgttctttcccacacgcttctgtgcgaaaaacagcggtcccggcgattcgatcagaagcggcggcgctaaaaataccgtaacaaccgcggtgatcgccagaccgacgatcgctcccgcgatatccatcagccgcttcacaaacagcatcttccagtcataatactgattggaaaacgtcacaaccggaacatttcccatcatattaaaattcttgtgataatcgtcaaaccgtttcagcagctcgatcgtgatatgcacggtcgctcccatatcctcgaacgcttccaccacttttgccagagattccccggtatcgtacggaacgtttaagaacacttcgtccacaatctgttccttcgcatactggaacatggtgtcgtaggtcgccacgaccggaattccctcataccaggttccgatctggttgtcgtcgatgatcgcaatgccggtcagacggtgctcccagtcttttgcattctcgatctctgcaagcgtatccttcacgcggtccgtcgtggtgacaagaaacagctggttcgtcccccgcttgttgcggtagatgtgcagcagataatacttgatcgccgcgtgcgccacgaagaacagcaccaggttcatccctgcgatacagaaatatacgcctcgggaggcatccgcattgttatgctgcaaaaagatcgtcagcgctgtcacaaaaatcatgatgacgctcgcctcaagcgccgcccagaaatccctggcaaggttgcgccggataaaattcttctccagatccgagaacagcaggatcagcatgtagatcacaagcacaatgccaaagctgtccatcagctcggacttcatgttctgtacggacacgttccggtatagaaccagccacagatagcccccgccgaaataactgatgacaaagcagatcagatccgccagaagcagcacgactgtctgaatcttttcttttgattggtacataataaaccctctcttttatccctcatagatgctttcccggttgcccagggaaaagtaaaggcaaaagcgctgctccggcgccgcctgccacacacagtcaaaaccgaactccggattttccacccggcggagcttaaacatctctgccacatccgcccgtgctcttcttgtaatctccgccgcaaactgctctccgcccggcgccgccacccggatattgactggaaggcatctcccgtcccaggtctttgcaaacgcccatccggaacagactctgctgccgtcctggctctccgcccggtcgatatggtagagcagctttctcacgcgcagatacgccgactctctcacaatctcgccgccgtccccggctcccgctccctcaagcagcgccgcaaacggaatgattctggttcccatccgccgctgcatgctgcgcaccggaaacgccccggctcttaaatactcctgaaaatgttcttccatccgcgcaaagcattctgtctcttcctccgtgaggccggcagacttcagccagtccgcaagactttttccctctgccttaaaaatctggtaataggcataatagactgcacggtagatcagatatttcttcggcaccggaaacgggaacgtccactcgtaatcgatgacggtccacgcgctgtccgcggcggctttcccgctctccacgaaaatattggaaaatatcatatccacatcgctgactgcggcgcagggcattccctccgggagcttttcctctccgaatacctccgcaaactccggcgtcctgtcaaaggggatctctcctccgctgccggacacacggtctgcatacgccgcgaccatctgttccactgtctcccagtcgccggctgccaccgcctgttccatgagatgctgcagattgtccccctgcacaaacggcgacacgcttctgcatccttcaggcacatcctccgtcgtacaaggacagaaggcgatacggctgcccgcgtatgccgcgtccagctgctttccgagttcttcctgcctgcggatatggtctcccgcctgtatggtacaggcgtacttatatacttttttctctccggcttcatcggttactatatccgtccggatacggaaccgttccgcccgctcattggaatattttgaataaatcgttcgttccaaacgcgctatccctcctgcacagcttcgatcaaaaaggaattggagaacgtctgaaatacgccctcctccaacagggaatcaaacatcacacgctcgttgaagcatgccaccctgtcacggtcataattgctgcgcccctcggcgagttcgcctttctgcggcagccactcgtccgagtagatcacggacgggaacttgtgatcgggatagggataataaaacgtcagtcccccaaatcccgcctcctgcagcagccttgtgtactctgcccggctgtagcttctgccaaagcgtccaaccgccgccgcatccggataaccgtcaattccggtaaaatatccgccgcagtattcttcctgacatcccgcaagatatttcagcccgatccggttggcgtccgccacgtaaaactttcctcccggcgcaagcagctcccgtaacgccggaagctgtttttcccagcggtaaaaatggccggcaatcaggatcgcatcgaaccgcccgtgctccggaagctgtcttcttatgtcaagcttctccctctcctgcggttccttaaagcgctctcttaaaatcttctcctgcagttcactctccgcaagcaccgtcacgctgcccgccattgcgagcagctttccggtcagcgccccgcactccggattacattccagaacccgcatatccttatcaaacggcaaaaagctcaccagattctcccggatctgcgacaaatgatacagatacgggtaagatgcccgctgttcgatgatgcccgcataatctgccttactattctgttttatgctctcatacagttccttcagaacttctgcatcctccatactgttcctccgcatcccactgctgtctgacatgctgtcggtgttccctgctcttttattcctccacacgctccacggtcgtctccgaattcatatcatagaaaccaaccgtattcttgtccgatatgaccgtaacgcccaccacatcatacagccggtggtacgcacggaactcgccgcccacgtaaccggtacagctgatggacagcagatactcgccgccctgcagatccatattctgtttaaaggaagccacatagatctctcctgcccgcgccagcccgacgccgaccttctcgtacatggtgttcgttcccgtgacagcggttccctgcacagtcttaaacgtataggtaaaaatcggatcctgaatatcggtgtgaaactgcacctttgagcggatagtaaaagacgtccccttctggatacagctcgtatagcttccgtactcgtcaatcaccgcaaaatcaatgatttccgcttccccggttccgtattcattcacctgcggattcaactcatagttggatttccacagcttctttgtcccattttccttcgcgtccgcaagcacctgtccgctcgcaatattctgtgactgatttaacagcactttcttgtacaggttgatcgtgtccttgggatttccttccgacagcttgacgcccttgtttaaaagaatcacgcggtcacagtattttgccacactgctgatgtcatggctgacaaagatgatcgtcttgccctccgccttgaaatcctcaaactttttataacattttgcctggaaaaacacgtctccgaccgacagcgcctcatcgacgatgaggatctccggatcaatgttgatcgccaccgcaaacgccagacgcacaaacatgccgctggaatacgtcttgcacggctggtttacaaattcgccgatatccgcaaatttcaaaatatcgtccagtcttgcatccatctcctccctggagaatcccatcatcatgccgttgagatatacgttttcgatgccggtgtattccatgttaaagcccgcgccaagctccagcagcgccgagattctcccgtcaatctcgacctcaccgcttgtgggtgagagcacgcctgtgataatttttaagatggtagatttgccggagccgttcgttccgatgattccaaccgtctcaccttttttcacatcgaacgtgacatggtcgagtgcccgatgttccttgaatctgccttttcccgcaagtcccagcgcgtcaaacagccgttccgagggtctgttgtatagccggtataccttgctgacatcttctaccctgattgctaactcatccattcagttacaaattcctctctataatacatccgcgaaatgcggtcgcagcctcttgaacacggttgttccgagaaacagtatcactgccgtcacaacccagaaatatacggtaattcccatatcctcccagaatccgatgtgattgatcagtgcgttccggtatcccgaaacaatgtagtacatcggattgagctttaacacggcaatcgcccaacccggtatctgcaccatcgtctcaaagttccacataatcggcgtcacccacatgccgatctgcaacaggattcccaccacttctttcatgtcgcggaaaaataccgtcaccgcactcgtcgcatacacaagccctgtcgcaaacagaatcatacagaaagaataatatacaacctgaagtgcataccagtccggcatatatcccatacagatgaaaagcacaatcgtaaacgccacaaaaaacagatgcgtaaacagcgccgatatcatttttaccactgggagcatatcgatctggaacacgactttttttaccagatagctgtactccaccagaacaccggtgccgccgttcagcgcttcctgaaaatagaaccacggcacaagtcccgctgtcagccacagcacgaacggaatctcaattccggtccgaagatccgtcgccttggaattcagtcccttctcaaacacgaaccagtacaaaagcaccgtgattaccggctggacgaacgcccagaccacaccaaagtaggagcctgcaaacttcttcttgatgtcattttttgccagattccataccaggcttctacttccgatcagatgatgaagcagtgatgtatccttcttctttcctgccatctatgttctcctaatctctttctatccctctgcaggcgcatgtttttccttactttatgccgtgcgccgccttatattctgcgaagcttttctgcactttatccttgtcggataagatcagatccgccgctgtcattccttccggcatcggccattccacgccgacctcggcatcattccacagaataccgccctcatcgttcggatggtagaagtccgttaccttgtagcagaactctgcctcctccgacagcacgataaatccgtgcgcaaaattcttcggcacgaaaaactgcttcttgttctccgcggaaagcagcacgccgtaccatttgccgaacgtcttcgatccctctcttaaatccaccgcaacgtcaaacacctcgccgtttaccacacggaccagcttgtcctgcggataattgatctgaaaatgaagcccgcggagcacgccctttttcgatgctgactggttgtcctgcacgaactggcagtcaatccctgcctccgcaaaatcgttgtaattgtaagtttccataaaatatccgcgcgcatcaccgaatactgccggctcaataaccttcagcccctcaatgccgttgcaattctctgttacctttatctttcccatgttctataatccctccgcgatttccatcagatatttgccgtaatccgtctttaagagcggctgtgccagcttgatgagctggtctctgtcgataaagccgcgcttgtacgcgatctcctcaatgcaggagatgtataagccctgacgtttctggaatgcagacacaaaatctgccgcagcaagcagcatgtcgtggtttcccgtatccagccatgcgaatcctcttccaagcgtctccacgctcaatgttccacgctccagataagcgttgttgacagaggtgatctcgatctccccgcgtgcggacggcttgacgtttttcgcaatctccaccacgtcgttatcgtaaaagtaaagtcccggcaccgcgtaattggacttcggatactccggcttttcctcgatggacagcgccttgccgttctcatcgaattccacgacgccgtactctctgggatctctgacataatagccgaagatcgtcgcaccctgctccttttccgtgcgctccgctgcgctctttaacactttggaaaagctctgtccgtagaaaatattatcgccgagcaccagtgccaccgcatcatttccgataaatttttcaccgatgataaatgcgtccgcgagtcctctcggctgctcctgcactgcataggaaaaactcatgccgagctggcttccgtctccgaaaagctcctcaaacaccggcagatcccgcggtgtggagatgattaacacctcgcggattcccgcaagcatcaacgttgataatggatagtagatcatcggcttgtcatacaccggcatgatctgttttgaaatcgctttagtcagcggataaagtctggtaccggagcctccggctagtattattcccttcatctgaaaaatcctcccattttatccaatatacgccacgtccattaacatttgtaatggacacagcttaattttttcttaatttaaaacgcaaacaagcagtatcgcccaaaaggcggtactgctgcctgcatcaactatctgttctgatacatatcctcataatatttctgataatcaccgctggtgacattcttcatccagtcctcgtgctcgaaaaaccacgcgatcgtcttgcggatgccgtcctcgaactttgtctccggctcccagcctacctctgccttgatcttgtccggtgcaattgcatagcgtctgtcatgtcccttgcggtctgccacgtaagtgatcagatctttgcttaccagctttcttctcggatcgtccgccggaagcatttcctgtaaggtatcaataataatctcaataatctggatattctgtttttcgttgtgtccgccaatgttgtaagtctcaccgaggcgtcccttttcctgcaccatatcgatgcccttcgcatgatcgtcgacatacagccagtcacgcacattcttgccgtcgccgtacaccggaagcttcttgccctgcagcgcattgttgataatcagcgggatcagcttctccgggaactgatacggtccgtaattgttggaacagttcgtgatgttcgccgggaacttgtaggtatcaatgtatgcctttaccaacatatctgaggatgccttgctggctgaatacgggctgtgtggtgcgtacggagtcgtctcataaaaataagatccgtcatcctcgagggagccgtatacctcatccgtcgatacgtgtaaaaacttcttgtccgccttaaatgtgccgtccggaagttcccatgctgctttggcacagttcaacatcactgccgttccgagcacgttcgtcttcacgaagacctccggattcttgatactgcggtctacatggctctctgcagcaaagtgaaccacacggtcaatgtcgttctccgcgaaaatcttcgcaatggcttccttatccgtaatgtccgcccggataaacgtataatttggattgttctcaatgtccttcaggttctcaaggtttcccgcatacgtgaggacatccacattaatgatgcggatcgtatctccgtatttgcggaacatgtagtgaatgtaattggaaccgataaaaccggctccccctgttaccaaataagttctcatctcatcctccatttatttccaatacttgcagtctctattatccatggccgtttcactgccataagtctcttcattttatcatagattccgttccagtacaagcttgtatacacagaccgccgtttcacctctaccaccagtctgtcggcatctgctccttaacctccgacagccgtaccacaacacaatcctccgtcacaagaaccgatccctcttccgggaaatccttcatctgtcccgccagttccaccgcgtgtctcttctgctcttccgtcgcatcctcccgcagcacgttcccggtataagcctgtacaaaaccgcaaatacggtgtgtcgctccggtcgggttctccatactgtaatcccaaccgtagaacgaccagccatacatctcggtccgcctgcaccactctgggagatctgcctcctgatagcccacaaacaccaccggaagctgctgcagtttccctccgtctgccccggcgaagcgctctaacagctgctgggttttctgctcatcctccctgcagcgtatctcatcggtcacggcaaggcgcagatcatagccggtctggaccgcaatcacaaggcagatgcacaatctgcagacgagcagcagccagtaacccgtaccgcggtctctgccgttccagagttccgcaagccgctccgtcacatacattcccaggaacgctcccgccaccggaagcgcaaactgtgatctcgtcacgatcatctctcccatgtatgccgtcagaagcagcggcgcaagcaccagtcccgccagtccaagcaatgaataccggattttcttcttctcccacggaagttcctgttttttccggcaggcaagcacacttcctgccagcacaagcagaagcactacgccgcatccgtagaacgaaaaatttctggggccatggccgagcagcagatttttcagcgtgcgcagcacattcttgatacatgcgagcgcaggcagtcttccccagcccatctggctgtccatataatccgaagacaccagaaacgtgctcatataccagtgatagcacagatacaccacaccaaaatgtacgatcatccagagaatctgccggagatatccgccctgctcccgctccgcagtcagctccgccaggaagaaaacgaggcacactgcgatgtagtaaaccgccagcgcctgatacgatcccagaccgataaataacagaacgcccgccgcaaaagtccggagcagattcgttacagttccggcgccgatcccgctcatcaggaatgccgcctcaatcaacagcagcattgcaagcgccacttccgcctgctgcagggaaaaataaatctgatagcaccagatgttggacgtcacatagaggagcaggaaaatccagtaccggcttttctttttcccggagcgctcataaatgccgaacgtcagaagattggctcccagccagaaaaacaggaagaacaggatcccgctttttataacctgatgtgttccaagccccagaaggtgcttgagccacgccagctcccaccgtccgatcgcaagccatcccagactgcttcccggatggttgattaactcttccgtatcaatgcggatgttgccgcaaaaaacaagataaccgaaacagatcagcattgccgccattgacgcagcgagcagcccccagtatttcctcacatagtcacgcaaatcccgcattacaacactcttcatctgttccggttatcctttcacttttctgtcggtatctctctcagcccaaatgctgcatatattcatccagcgcgctctcccagtcagccatacgatagccgtccgtcaggcgcatcatgtaattatccagaatggaatacgccggtctcttcgccgaagcaggattcatcgccgcatactcctcacttgtcacatgtctgacgcgggtattcttcccggcacgcgcaaacactgcctccgcaaatgccgcccagttggtatccccctcgcaggttgcatggaacagtccgtaattctccgttggttcatagtgatgaatcgcacgtgcaagttccactgcactggtcggcgaaccgagctgatcgcataccacgctcacttcctcatggttctctgcgagtctcaacatcgttttggcaaaatttttgccgtccccgtacagccatgccgtgcggaagataaaatactttctcgcgaacgccttcacgaagcgttctccctcaagctttgttttgccgtatgcactgaccggtcccggctcatcgaattccgtatacggtctcgttccgtttccggcaaagacataatccgtggacacatgtatcagctttgcgtcaacttccgcagcagcgatggccaggttgcgtggaccgatcgcgttaatgcgatacgccgcatcccactgtgtctcacaggcatccacattcgtgtgcgccgcacagttgatgataacctgcggacgctcggcgcggacaagcgccagcacggcagccacatcggcgatgtcaagtgctgtgacaccatcgccctccaccacatctgtgttgataaacgttacgtcttcctttgcatactctgcgcggattgcgcgccccagctgaccgttacagccggtaaccagtatctttttcatccggttttcctctcttactcttctattctccaagtccgttctcaatggcattcacaagcgccgcaagcgcttcctgttcgtcttccccctcgcataccagctcaatctcatcgcccgatttgatgcatgcaccgagcacgctcaacacgctcttggcatttgcagtattctcacggtatcggaatgtgatgtgcgatttgaactgcatcgcctccttgcacaggattcctgccggtctaagatgcagccccgttggattcttgactgtgactttctgacttaccatgctctcttccctccaatgaataattttcctaacaaagtctctgtctctacagcataatgcgcgtaatcagatccgcaagtctcttcgcttcctcgtcaatcaccttctgatctttcccctcaatcataacgcgcaccagaggttcggtaccggacggccggatcagcacgcgtccctcaccgttaaactttttctccagttccgcgattgcatctgcaatctccggatactccataaaatgctcttttttgtgattcggcaccttggcattgacaagcgcctgcggcagaacctccatgatcgctgccagctctgacaacggctttccggtgtccaccatcacttccagaagatgcagggcgctcaaaagcccgtctccggtcgtattgtcatccaggaaaataacgtgtccggactgctcacctccgatattgtatccgtgttcccgcatgttctccagaacataccggtctccgacttttgttttctctacgtggattccctctttttctcccatcagagtaaagcccaggttgctcatgatcgtcacaacaatcgtattcttcttcaatctgcccttctgcttcatgtagttgccgcagattgccatcacctgatcgccgtctaccagattgcccttttcgtcaaccgcaagcatacgatccgcatcgccgtcaaacgcgataccggcatccgccttctcgtacacaacgcgtgccttcagctcatccatgtgggtagatccgcagttcgcattgatgttggttccgtccgggtcggtgtgaatcgccaccagttccgcgccaagatcgctgagcgccttgacggacgtgtaatacgacgcgccctccgcgcagtccaacacgatctttttgccgtgcagatcgaccggaacacatttttccataaatttcacgtattcatccttcagatcaaagcggtattcgatctttcccaccccggatccgatcggaagtaccacgtccttcatgttgttgcggatcagcgcttcaatctcatcctccagtgcatcggaaagcttgtagccctcgccgttgaagaacttgattccgttaaattccatcggattgtgcgatgccgagatcacaacacccgcatctactttatgctttcttgtcagataggcaatcgccggtgtcggcataacccccacaaaaatggcatttgcgcccacggagcagattcccgccatcaacgcgctggcaagcattcctcccgatattctggtatcgcatccgacaatgattgtcgcctgatgttccgtctctttcgtcagcacatacgcgcctgcctgcccaagcttggttgccagttcgatcgtcagttccgatcccgccacgccgcgcacgccatccgtgccaaacattctagccatgttctatttcctccatgttttcacttttttacggattgttgctgcttctctccgcatcacttccagctgcaccgttctcagtggctgtcttatccgttttatcggttttatccgacttgtcagccgcatcgccggcagcggcggtgccggctgtatcgttcgtcttgctctcactgtctgtcgtatccgtattatccgaagtacccgtttcggcggtgttgtggtcggtaattgtcaccggcagtgtcactgttccagtcacccagcagtgctcctgctccagcgtgatctccacattcaggtgatgctcgcccgctccaaggttggatgcgtccgctgttccgataatatcttttgcagagattcccgcaagctcgctctccgctccgctgatctctaccgcgaccgtgctctccatgtaatttgcattgtaaccgtcgcgcacattctgaatggtaaagtttgccactggcacctcgtaagtcgccttgacaaccggctccaccttcgcggtcacctctacttttgcatccgagttcagcacaagtgccgtttgactcggcagataggaactgatatccaccgttgtggtcagatcctcggtgataccggaaatgtccagcacctcctgcggaatggtgatcttgctgacggtattgagcgttgccgcctcgcccttgatacgcacattatccaggctgctttccacgccggtaagcacatagccgtccgccggttcgcccttcgcctcaaactccaacggcacatccttggtatttaagatctgtgccgaaatattgactgtggacagactgagtgtcagctttgtcgtgtcgatcacgttgccgtcggcatcatataacaccggcacaacggaatccgtcacatccgtggacataccttccacattgatcgtcgccaccgccgtatcaatctggctgacgatggatgccggtcccgaaacctttaacaggttggagcccacgatctgtaccgtgccgagtgcacagccgtccatcacggttcccttggttgccgccgtaatcgccttctggcaggtgccgcggtcttccagcgccacttccagatagagctgtttggagacgacggagactttattgctataccgcttcgcggtgatcgtcaccggcacgcggtaaattccgcttccctcatcgtactcaatattctccatgtccgccgttgcggaaaaatcggcattggataattcatcgtgcacgctgcgcgcagccgacacgcggaatgacactacgttgctgctgtccagcggttcataatatttgttctgcgatgtgatatagtccgtattctccgctacaacattggtggtataggtctttgacgtcgtcggatcgtcaatgttaatcacgactacccacagcacaaccgccagtatgaccgccagtattttgaggctaaaattatttgttatcgtttttccgagccgttttagcatctttcagcctcctcttccacaatgcaatcttcgataattcccgttcccgcctctggatgtacgtcagcttgttcttcagaaactcggcatctacattgcggtaaagttcaccgccgagcgcaatcgacactcttccggtctcctctgacacaacgattgtcagggaatcgctcacctcgctgattccgacagccgcacggtgtctcgttcccagatccttgctgatcgacagggaatccgtaagcggcaggtaacaggtcgccgccacgactctgtccccgcgcacaatcacggcgccgtcatggagcggtgtgtttttttcaaaaatattgatcagaagctggcttgtcagaataccgtccaccgcgattccggtgcgctcatattccgagagaacaatctcatcctccaccacaatcagggctccggtcttcacctttcccatctcgtagcacgccttgaccatttcattaatggtcttatccgagaacttccccgtatcctcctttgaggaatcaaaggaaaacaggaacgccagaacgtttttccgtccgagattctcaagcgccttgcgcatctccggctggaagattacaaccagagctatcaccaggacgtttaacgtattccttgcaatccagatgatcgtgttcatctggaacaatgctgccaacagaacgaagagcagaatcaccatcaaaccgcgcagcagcatccatgctctggtattcttgatccacaccagcatatagtagatcagaaacgctatgattatgatctccacgatatctgttatggagatttttggaagattcatataaagagacgctttctgccagaaagcatcgagggtagctaacatgttctgcacgcggtccacttccttaatctaataattcttcgtcgatatccatctcttccgcaaaacgcttcttcgtgagacgttccttttcgtccttcccgctgaaacgctttacctgcttgttggtgccggataccacagccttcggcactgcttttacatagtagtaatattcatcatcctcaaactgcagccgctctgttcttgagtagtcgaggttaaagaacaggaactgtatcacaaatgcaatcagaagtgaaatcacattgccgaccagcacgctcaccgtcttaccggaaattccaagcagcatatagcccgcaatcaaaccgattgtctcgaacagaataccggatgcaatcgcaatctgccatgcattcgcgatagacattctgcggatcagatatacaataatcagcgtcacagccatgatgccgagcacgaggtacatttccttgttgccgagaagctggtttaacgccaccacgatcttggaattcgcctccgcactctcctccgccgcaccgccgagcagcttttcattctgccggactccgtcgaggaaaaagtaaaccaccgtaccgcagatcactgcaaatacagaatatgcctcctccagcagtcccattccaaccggaatcacatacgggatattcagccggaagcagatcggcgtcagcaatacgcccattccctgtctgggagcaaaacgaaaatagataaaatagatcagcacaaacagaagaagtgcgaccagacatacctcaatcgataatgcatacatatccgccagtatgacgaccgccgcaataaagatcgtgccgcccacaggcaggatggcacagagcagtcctaaaatcagcgccaccggtgtggagctgaccagttccatgtagccgatgttcctgtcaatcgtcatcagcgccgcaaacgccacgataaacttgacgatcggtgtaatgtacacttcgtattttccgtagaagcgcaccagtttttctttgagttccaataaggttgtcattccatgcctcccgctctaatcccagtctttatgatcggatgtccggaggcgttcttccctctcatacatctgattcacctttttcaggttgttgtaatacttcttcaccttgcggcgtccctctgtgtatttcatgttaaatattacccacgtggctccgaggtaaatcaccataaacaccagatacggcactaccgctgtcatgacaagcccctggatatcgaacttgttcagctttgcaagcagctcttccgtcgcatacagcccccacattcccatcagaagcccgtagcagatggttcctgtcacgaagctccccagcagacgcatggaaacataatcttttctcgcatactgcgtcatcggcttacactgtttcccgtcatttgtatcaaactgtgccatcttaatcaggtggcgcaatcgttcttcatttaccatacagtagttatcctttctccgccctgccgttccagcctgcgcagggcaaaattgcacgcaattatgcattctttttttattataacacagcactatttattttcaaagcaaaaaacagagcccgatacccaggccctgttgattctcttggtattatttgagaaaacgcatgcggtttttatcccgctctgtctcctgcggctgcggcggctccggcttatgaatcgactctgcaagcgcgttcgccatattgttcttgcacttctcgcaaaatcttcccgtgcggatcggcttcccgcaggtctcacagacaatgccgtctgctcctgccacggaaagtgacagacgctcctcgcgaatccactgtctgatctgcttcaccgacacatccagctcctcagcgaccgtctccacacttgaattcggattctcctccaggaaagcctttacctcctggaacttctcctcaagctttttctgacacgccggacaaagcggcgctccccccatatagttaaacaggcgtccacagctcctgcaatttctcacttccatacttctcaatcctcctgaattcccctgtcaaaatcccgcaccgatgctgacgcaaatataatagatccgctctgcgccgcccttcagcaggacctccgaaacggtatctatcgttgttcccgtcgtataaatatcatccaccagtaatattttcttatattttactatatctgctgctaattgaaaagcattttttaaatttgccgctctttgtccgccatttaactccttctgcggcaccgtgttccgcacacggcgcacaagcccggcgtccacgggaagccccagctccccgccaagcgcccgcgcgaatgtctcggcctgattgtatccgcgccgccgctttttccaccggtacatgggcaccggaacgatcacttcgatttgatttttaaaaacccagtcctgataaagcgctgccgcctccctcgcataatacgccgcatattcgcgccggtttgcatatttaaaccggtacatggactgccggatatttccctgatacacaaacacggctttcccctggcagtacgcatgcctgcgctttccgcagtccagacagaattccgcccgctcgccatccagcggcttgccgcatcgcttgcacaccggttcctcggcaagccgtacagcatccgcgcaccttctgcacgggacacattccggcaccgtcacgcggtcgcagatcggacatctcggcggatagacgaggccaacgatcgtctccgccacccaccgcagtccgcgtcctgttttttcttttcctgttgcaaaatcagcctgcattgcatttcccgctctccccccggtcatctgattccgctttatcctagcatgtccgccccttttttgccataaacattttcttaattttttctttctttattttaaggaacggttgacgaatatacttttcctcattataattttgtctattaaaagcattaaagttttaatgcaataaaggaggagatgcttatgaaaaaagcacacaaactgatttcggcagtcttagtctccacgatggtcttatccatgaccgcatgcggcagtggagaaaaaacgtataaggtaggtatcctgcagcagctggagcatccggcactggatcaggcaacgcagggatttcaggatgccctgaccaaattgatgggcgattccgtcaccttcgatgtgcagaacgcacagggcgagcaggcgaactgttccagcattgccaccacctttgtctccaacaattacgatctgatcctcgccaatgcgacgaccgccctgcaggcttccgcggcggccaccagcacaatcccggtactcggaacctccgtgacggactacgcaaccgcgctcgacattgacgactggaccggcgccaccggaaaaaatatttccggcacctccgatctggctccgttagaccagcaggaagatatgctcgtggaactgtttccagacgccaggaatgtcggtatcctctactgttccgcagaaccgaactccgtgtaccaggcaacggaattcggaaagtatctggatgaggacggaatctcccacaaggagtacaccgtggcagattccaacgacatcgcctctgtcgtgcagagtgctgtcagcgaagtagacgtcatctacattccgaccgacaacaccatggcaggcaacaccgaagcgatcgacaacatcacacgcccggccggcattcccgtcatcgccggtgaagaaggaatctgttccggctgcggcgtcgcgacgctctccatcagctattacgacatcggctacaaagcgggcgagatggcttatgacattctggtaaacggcaaagatatatccacaatggatattgaatatgccccgaatgtcacaaaagaatacaatgcggatatctgttccgatctcggcattaccgttccggatgattacgtggcaatcggtgccgaataatatttttccttacaagggggtttttcctgatgaattattttatgtcgcttgacccgcttgccctcttccgttccatgcccggcgctttcgcccagggcatggtctgggggctgatggcactcggcgtctatattacctaccgtctgttggattttgcggatctgaccgtggacggttctcttgcaaccggaggtgcggttgccgtcatgctgatccgcggaggtatgagtccgtgggcagcacttatttttgcctttctggcaggcatggtcgccggtttcatcaccggcatcctgcataccgctcttggcatcccgggcattctggcaagcattttaacccagatttccctgtattccatcaacttaaacatcatgggctgttccaaccaggccgtcagtgttgacaagtaccctctggtggtctcgctccgctacctgtccgactccaacagcacccgtgtacagatttttgcgacatgcatcctgttctgttttgcaatcgttgcgattctctattggtatttcggcacggagcagggacatgccatccgcgcaaccggatgtaatcagcagatggcgcgtgcgcagggaatcaacaccaaccttcacaccgtcattgcgctcatgatctccaacggtctggtcggtctctccggcggtctgtacgcccagtatcagggtgcggcagatgtcaacatggggcgcggcgccatcgtcatcggtcttgctgctgtcattatcggagaagttattttcggcagactctgcgccgggaagaatctcgctttcgcctacacgctgttttccgtaatcggcggagcgatcatctattatattgtaatgaatgtggttttatggttaaagcttccttccgacgatctgaagcttttctccgcgatcgttgtggcagtattccttgccattccttatctgaaatccacacgcaaaggaaaggagcggtaacaccatggcagaaatgttaaaaatagacaatatcaagaaaacgtttaatccgggcaccatcaacgagaaagtggcattaaacggcgtgaacctctctctcgaggagggcgatttcgtcaccgtgatcggcggaaacggcgccggaaaatccaccaccttaaacgccatcgcaggcgtgtggccggtggattccggaaaaatctatatcggcggcgatgatgtgacacgcctttccgagtacaagcgcgccaaatatctcggacgcgtctttcaggatcctatgaccggcaccgcgacgacgatgtcgatcgaggaaaatatggcgatcgccgccagacgcggacagagccgcgggctctcctggggcatcacgaagaaggagcgcgacatctaccgtgagatgcttgccaccttagatctcggtctggaagaccggctttccagcaaagtagggttgttgtccggcggtcagcgccaggcaatcacgctgctcatggcttccatccagaagccgaggcttctgcttttagacgagcacaccgcggcactcgatccgaagacagccgccaaggtgcttgagatttccgacaaaatcattgcagatcatcacctgaccgccatgatggtcacccataacatgaaggacgccatcgcgcacggcaaccgcctcatcatgatgcatgaaggccgggtcatcttaaacattgccggagaagagaagaaaaagctgacggtggaagatctcctccatcagtttgagaaggtcagcggcgaggaatttgcaaacgataaagcgctgctgtcgtaaccgcagggaaaaaggcataacgcggtcgcaggatatttcgggagaagaagctgtccggatgaagtgagcgcaggcggaagccttttgtgtttcaggatgtaacgggcacaatcccttctaatcgcaaaatcgtgtatttctaatccgtgcagccgttgcctttgcgatgatccgtgtctttccaagtttggagcacccccgcggaagctgtccgcaagctacagacaattttaggacttttgtgcagcacttacctgcactctaagcataaaacataaccgcgcgaagccgatgtctgagtcggcatctgccctattttcaatagcagatgccggcgagttccggttcgcgcggttttatgatgtctatgcgtgagtgcagttagtgctgccagaaagtccgctcattgtctgctgcttgacggacagcttccgtggggtgttcaaacgtggcaaagacacggaacctaagacaacgatcgcacggaagaaatacgggattttgctccaaagaagggactgtgcccgttgcatcctgaaacacgaagggcttctcgcctgcattcgttttccccggatatctttttctcccaaaatattccacggcagtgttatgcctccttcaggcggtcacacagcccgctgtatcgtttttgctgcgacgtgttctgtaccatctgtgcaaatgttacttcattgccgaccagcgtcacacatttccgagcgcgggtgaccgctgtgtacagcagattccggttcataagcatcgacggtccggacaaaagcggaatgacgaccgccgggtactcgcttccctgcgacttatgtatggtaatcgcatacgccagttccagttcatccagcagtttgtatggatattccaccattctgccctcatcaaattccacagtcatcgtctccgcgaaatcgttgatctcccggacaattcccatgtctccgttgaatactcccgttcctttatccacagacagaccgtattttgtgcggatttcccactctaactggtagttgttccgtgtctgcatgatcttgtctccttcacggaacagaatatcgccgtgttccttttcacgcttctgcggagacggcggattcagatagcgctgcagtattccgtttaaccgctctacgcccagcagtcccttgcgcatcggcgtcaacacctgtatatcgtacggcgtcgcatccacaaatttggggagtttctgcttgatcagctgcagtaccacgctgataatcacatccgcgtcataccgctttaggaaaaagaaatccatgcttttattgtccaacgtcacttcttcgccctgattgattttgtgcgcattcacaatgatgtcgctcgtggatgcctggcggaaaatcttcgtcagcatgaccacattgcactcgtgcgagcgaatgatgtcccgcagaacacttcccggtcccacactcggcagctgattgacatccccgaccagaatcagtctcgttccaacggcaaccgcctttaacagtgcatgcatcaaggaaatatccaccatggacatctcatcgataatcacaacgtccgtctcaagcggattctgctcattccgctcaaaccctgccgcaccgtccacaccgccgttcagttccagcatgcggtgtatggttctagcctcaaacccggttgtctcactcatgcgcttcgccgcacgtccggtgggcgccgcgagaaaaatgtcgagtccttccatctcaaaatacttgatgatcgtattgatcgtcgtcgtttttccggtacccggtcctccggtgataatcagaagtccgttgcgcaccgcctctttgaccgctgtcatctggtgctcatccagttccattccggtctgcttctcaattctgcgaacacgctcctcgatttccagatccggaacctcatagctgacattgagctgttttaacatggttgccgtatttgcctccatgtagtaaaaggacgccgcatagatctgcgtctggttttcgccctgcttcatgatgattttccgctcgatcgccagatccatatactgcttctcgatctgctcctccccgacctcaagaagctgtccggttcttctggtcagttcctcctccggcaggtaggtatgcccctctgtggatgcctgaagcagcacatataaaattccgctccggatccggaaatcagaatccatgcggattcctacccggacagcaatctcgtctgccgtgcggaatcccacaccctcaatgtcgtccgccagccgatacggattctcacggataatcccgtatacctcctgtccatactgctgatatactttcactgccaggttcatcgtgatgccgtactgctggaggaaaatcatcgcctgccgcagatcacgtttttcattcacctgatccgcaatctccatcgccttgcgctcgctgattccctttacttccgccagccgctccggctcctcctcgataatccgaaaggtatccgccttgaatctgcgcacaatccgcgctgccagcgccagaccaattccgcggatcgccccggaaccgagatagcgttcgatggcttcctcatcttccggcgctttctcctcaaaactttcgaccttaaactgtttgccgtaagtaggatgatcggtatagtcgccggatgcctcgatgttctccccctctgcgatcgccgagaagattcccacgcaggtaatctcctcctccccgctcaccagattgagaaccgtatatccgttgtctgcatttctgtatataatatgttccacatatcctgctaacttttccaaatcattcctcccgccgaaaaaagcagagaacccgtcacctctaacggtgaccgccctctgcctcgttcattcttaactgccggcatctattctatgccatagttccgtttcatctgctcataaagctgctgcgtataattttctcccacctgatccacaatctcatctgccatcagttcgatcgtgctgtccatgtgaaaatctgtcagcgtactgagagaagaatccttatcctcgtcatcatccgaaatgagattctcctttacttcctttaatacctcttccacaaagtaggactcaaaatccttgcagaccgagagcagttcttcctcgctcgaaccggaggacacactactgatcgaattcttcagcgccgacgcgctgcctgcggctgcgctgttctgtgcattgctgaccaatgatgaaataccgtctatcgaaaaactcatactttacgctccattccgcttatcatccgcttaccgttcgcttatcatctgcttatcgtttcaggttgttcgccatctccagcatctcatccgatgtcgtgattgccttggagttcaactgataggcacgctgtgcgataatcatattgaccatctcgtccgccacctgtacattggacgcctccagataattctggcgaacctggcttctggtaagacctgctgtcgtattctcattcattgccgcacccgaagctgctgtaacttccagaaggttgtcacccgttttctcaaggccgctcgggttgttaaactggaacagtccgatctgacggttcatattcacataagttccatttgctgtcgtgtaaccgattctgccgtcgctcgatactgtcacactgctggaacttatattggccggaagaacgatctgctggttattgctgtccagcaccggatagccgtccggattggtcagtgtaacgccgttggttcccactgcccacacaaaatctcccgctctggtatagcgtgtctcgccatctgcgcagcgcactgcaaaaaatccgtctccgacgattgcaaaatcggtatcattctcactcgcctgcagcgctccctgtgtgtacacggatgtgactgccgcaactctcgttccgagtcccacctgtgccggaatcggtttctgctctccgtttgcactcgttgtcttcgtctgaatggtctggtaaagcagcgacttaaactctgccttctcctgcttgaatccaaccgtattcacattggaaagattgtttgaaatattgtccacgttcgtctgctgcgcaagcataccggttgccgcagtataaagtgccctcatcatatgtcagctacctccgtctatacatttccgacctgattgaccgccttatccagtgtctcatcaatcgtgttaataaccttctgtcctgcctgatatgctctggaaatcgtaatcatattgaccatctcagaaacaacattcacattggacgactccagcgttccctgcacgatcctgccgtctgctgccgtcaccgttcctccgttcacaaggtcgtacatattctcaccgtacttcgccagatagtcataatccgcaaaatcgacgatgccgatcgttccaacctgctgatcgttctgatagatattgccaagctcatccacggtgatcttctgggtcggatccacctgaatccgtccgttcacattgccgtttctggcgtcatttgcattcaggacataatcgccgtccttggtcaccagatagccctgggtgttgaccgtgaacgctccgtcccttgtatattttacggatgaatttccctgcttatccgtgtaggcaatcgcaaaaaatccatctcccttgattgcaaaatccgtactgttatcagtaaccttgaaacttccggtactgtaatccgtatacgtctcaccgatatgaacgcccatgctgattgtacccagcttctgcgcaagaccgtaagacgatgtatctttgatcttgattgccagctcatctgcaaatgtctgggacgttgtgccttctttcttataaccattcgtatctgcatttgcaagattgttggaaagcacatccagacgcttctgttcatttatcattcctgtatacgctgtatacaatccctttaccatagactgctccttttcctgttacctcttgtaacttctgcctgcttctcaccagaatccatcagacgctcccgcatcccaagggctctttgttgtttatatcgtcataactgccgtcaaacttaatcgtcgtcgcgctttccggacaggaactccacgaactttccggttccgactgccacacaggtcatcggctcctccgctgtcatggtattgatgcccgtcttatcctcgatcagttcctcaagtccgcgaagcagtgatccgcctcccgtgagaacgattccgcggtccgccacgtccgccgcaagctcaggcggcgtcttctccagcaccgagtgtaccgcttccacgatctgcagtgtcggctccttcagcgcctcttccgtctcctcggaagaaacggttaccgtcttcggcagaccggttaccatgttacggcctctgacgtccatggtctcattctgtgccagtgggaaacaggaaccgatcttgatcttgatgtcctccgctgtgcgctcaccgatcaacagattgtgtttctttctcatgtaacggacaatcgcctcgtcaaaatcatctccggcgatcttgatggaagtgctgacaaccgatccccccagagaaatcacggcgatgtccgcggtaccgccgccgatatccacgatcatgttgccgcatggtcttgaaatatcgattccggctccgatcgctgccgcaatcggctcctcgataatcgccacctcacgcgcacctgcagaataggtcgcatcctcaaccgcttttttctcgacctcggtcactccgctcggcacacacacgctgatgcgcggcttgcggaatgtcttcttgccaagtgccttctggatgaaatacttgatcatcttctcggtgacagtataatcagaaataacaccctgacgcagcggacggactgctacaatgttgccgggcgttctgccgagcatcagtctcgcttcctctccgattgccttgattttgtttgtatcacgatcaaaagccactactgacggctcctttaacactacacctttgcctttaatatataccaggatacttgcagtaccaagatcgataccgatgtccgtactcatcatattctaatctgcccctttcttttctctgccaatggttcatctattcgttgaatctttcttcacgtccaaaaggacataaagatgcatttaatcatatttttacatatacagcattattatatacaaaaactgggatttttcaaagctttttttcgcccgcgccgccatttttgaaaaaaataagaatttcttcattttttgtccggaatatcatattttttcattttttcatcacgtattcatcacatttgcgggttatatttttttacgtactaaatggtgtaccaaacatacaccgccccggaaatattcctcaaatattccgcggttagtataatttttcataactcataccttccggcgcaaacaccaaacgccgggaggtactccccgggtataacgaattttcatccatataaattttcgatgccatatatttcacaacatttctctgaccgcagatgccagcgcatctgttgtcaaaaaaggcactgtatgccgcgtgttttccacgtttgcgtccagtgccttctccttatttccactatttttccagatatttcttgacatactgtccggtgtaggactccggtatctgcgccacctcttccggcgttccctgcgcgatgaccgttccgccgccgtctccgccttccggtcccatgtcgatgatgtaatccgccgtcttgatcacgtccagattgtgctcaataaccaccacggtattgccgccgtcggacaatctccgcaaaatctcgatcagcttgtgcacatccgcaaaatgaagtccggtcgtcggctcatccagaatgtagatcgtctttccggtgcttcgcttggagagttcggttgccagcttgattcgctgcgcctctcctcccgaaagctctgtggacggctgtcccagttttacataggaaagtcccacatcgtagagcgtctgaatcttgcggtggatggacggcacatttttaaaaaactccagcgcctcctccaccgtcatatccagcacatcataaatgctttttcctttatacttgacctcaagcgtctcccggttgtaccgctttccctcgcagacctcacacggcacatagacatccggcaggaaatgcatctcaatctttaagattccatcccctccgcacgcctcgcagcgtccgccttttacgttgaagctgaatcttccctttttgtagcccttcgcctttgcatccggggttgccgcaaacagatcgcggatcatatcgaacacgcccgtgtaggttgccgggtttgaccgcggcgttctgccgatcggcgactggtcaatatcaatcaccttatccagctgctccatgccaagaatctcatcatgctctcccggaatgcagcgtgcccggttcaggtcgcgcgccagccgcttatagagaatctcattggtcagggagctctttcccgagccggacacgccggtaatgcaggtcataatcccgagcggtatgttcacatcgatgtttttcaggttgttctcccgtgcgcctttgatcgtcagaaatcccgtcggttttctgcgctcatccggtaccgggatcttgattctgccacttaagtacgctcccgtgatcgacttcggattcttcatgatctcctgtgccgtaccgcaggcgaccacttctccaccgtgtgagccggctcccggtccgatatccacaatatagtccgcggcaagcatcgtatcctcgtcgtgctccacgacaatcagcgtgttgccgagatcttttaaattcttcagcgcccccagcagcttatcgttatcgcgctgatgcagtccgatcgacggctcgtccagaatgtacgcaaccccgaccagcccggaaccgatctgcgttgccagacggatacgctgtgcctctcctcccgagagggtaccggtcgctctggacagggacagataatccagtcccacctcattcaggaatccgacgcgtgcgcggatctcttttaaaatctgatcgccgatccgatgctgctgctcccccagcttcatctccgccagaaaggcattgagattcttcaccgacatggaagtcatctcataaatatttttatccgcaaccgtcactgccagagactctgctttcagccgctgtcccttacaggtctcgcagggggtaatccgcatgaactgctcatattcctgcttcatgacctccgaaccggtctcccggtacttgcgctgcacgtttttgatcagtccctcaaaggcaacatcataaacgccttccccgcgctgtcctctgtaatggactttcacttccctgccgtccgttccgtagatcaggacatggcggatttcctccgggtattcgcagtacggcgtctccagcgaaaaatgatactcctccgtcagcgcctttaaaatagcgtatgtgaaactggacggatctgtacaggactgccagcccatcacctggatggcgccttccgcgatcgagagacgtttatccggaatcatcagatcctcatcgaattccattttataaccaagtccgaaacaggtcgggcacgcgccgaacggattgttgaaggaaaaacttctcggttcaatctcgccgatgctgatcccgcagtccgggcaggaaaagctctccgagaactgaatcggttcaccgccgatcacatccacggtcatgagtccgtttgccagtgtaagcacattctcgatggaatccgccaggcgcttctcaattccttcctttaccatgagacggtccaccacgatctcgatattgtgcttcttattcttgtccagtttgatctcttccgacagttcatacatgctgccgtcgacaatcacacgcacataaccacttcgcttcgcctgctcaaacagcttctgatgctcgccctttctgccgcgcacaaccggcgccagcagctggatcttcgtgcgctccggcagttccatgatctgatcgaccatctggtcaaccgtctgctttttgatctcttttccacacttcgggcagtgcggcacaccgatccgcgcatagagcagtcggaagtagtcgtagatctccgtcaccgttcccaccgttgagcggggattgcggttcgttgacttctgatcgatcgagattgccggcgacaatccctcaatcttctcgacattcggcttttccatctgccccaggaactgccttgcataggaagacagcgactccatatagcgccgctgtccttcggcatagattgtatcaaatgcgagggacgattttcccgatcccgacaatccggtcagcacgacaaattcatctctcggaatatccacatcaatatttttgaggttgtgctcattcgctcctctgattttaatatattttctttcggatgttttcttcattgtcttatcctttctacagatcacgcagcatccctttgagttcgatcatcttgtcgcggtattccgccgccgcctcaaaattgagatccgccgccgctttttccatctttttctggatatcggcgatcagtttcgtcagttccgccttgttcatcgactccggagacttcttgaaattcatttcttcctttgcgatcttcttggaaacagagatcagttcccgcaccgacttctgaatcgtcgtcggtgtaatgccgtgtgcctcgttgtactcctgctggatcttgcggcgccgttctgtctcctcgatcgcaacgcgcatggaatccgtaatcgtatccgcatacatgatcacatgtccctcactgttgcgcgccgccctgccgatggtctggatcagcgacgtctcagaacgcaggaagccttccttgtccgcatccaggattgccaccagggtaatctccggtatgtccaatccctcacgcagaaggttgatgcccaccagcacatcgaacacatccagacgcagatcgcggataatctccgcgcgctctaacgtatcaatatcggaatggagatatttgacgcggatccccagttcccgcatgtaatcggtcagatcctccgccatttttttcgtcagggtcgtaatcagcaccttgtggtggttcttgatctccttgttgacctcacccaccagatcatcaatctgcccctctaccgggcgcaccacaacctccggatcgagcagtcccgtcggccggataatctgctccgcgcgcaaaagttcatgctcatcctcgtatacgttcggcgtcgccgaaacgaacagcatctggtcgatcttgccctcaaattcctcaaaattcagcgggcggttatccttcgcagacggcagccggaacccgtaatccaccagcgtgctctttcgtgactgatcccccgcatacattccgcggatctgcggaattgtgatatgggactcatccacgataatcagataatcatccttaaagtaatccatcagcgtgtgcggcgtcgcccccgccggaagccccgccagatgcctggagtagttctctatgccgctacagaatcccgtctcttttaacatctcaatgtcaaaattcgtgcgctccgcgattctctgtgcctccagcagcttgtcctcgcccttaaaatatttcacgcgctcttccagctccgcctcgatattatcgcacgctcttaaaatcttttcctgcggcacaacgtagtgggaagccggaaataccgcaaaatgctcgagccggcacttaatctcgccggtcagcacatcaatctccgttatgcggtcaatctcatccccgaaaaactccacgcggatcgccgtatcgccatagtttgccgggaatatctcaagcacatccccgcgaacccggaacgtgccgcgatgaaaatccatctcatttcgcgtgtactgaatatcgatcagcgcacggatgacctcgtccctgtccttctccatgcccgggcgcagcgataccatcatgccaaggtaatcctccgggctgcccagaccatagatacaggaaaccgatgccacaacgatcacatctctccgctccacaagcgcagccgtggcagacaggcgcagtttatctatctcctcattgatcgccgagtcttttgcgatataggtatccgtctgcggcacatacgcctccggctgataataatcatagtatgacacaaaatactcgactgcattctccgggaaaaattccttcatctccccgtagagctgcgccgccagtgttttattgtgagaaataatcagtgtcggccggttcagctgttcgatgacgttcgccatcgtaaaggtcttacccgaacccgtcacgccgagcagcgtctcaaactggttgccctcacggaatccgcgcaccagttcttcaatcgcctgcggctggtctccggtcggcttgtatttggaatgtaatttgaaatgatccacttgcaaatctccttttatgttctcataaaaaatagaaagcgccctttcccggctgtgcagtacatgtccggaaaatctttgatgctgcaaatcggaaattaccaacgcttcatgttcttctcaaacttcccggtatatgcctgcttcaattcatctgccgtaattccgtaacagagcatgacatcattgtagtacataagaacatctgccatttcctcaaccagatcttttctcaattcttcctgtgtcagggcattcactgcaccatgctttttgacaatatcaatcacttcacctatttcgccaaccatccaaagcatcttgttctgtcctgtttccggacagatcggttcccatctgtccttgtacttatcctgcaagcttctctgcattttctgcatttcgtttatactaaaatcttccataccacattcctcccctgaaatagttctgcaaatcagaaattttcacttttttgcagcttaataagctgaaccttgccatccattttaacatccttggcaacaaaatcatacttctcaaacaatgaaattctgcaagcggaaaattataccgttatttcaacctgattttcctctattgcaacaacacagctttcataatagtcatcgcctgttgtgcgtggaccactgtcgaccggatatcctgcttcttccagtttcattatcaattcatccactttttctttactgccgacgctgaaagcaatatggattagacctgttcggttaagtgttttcttcatatcctccatatccggcttattcattatctcaagtctcgaaccgccctcaaaagcaagaaaatatggcctgatttttcagtctatctctcgttccaacagcccctaacaatcatgatttttccgattctgcaaacttgaatttcatgcgctatttgtttatcaaccattccatagtttcaaaattcaaatatagttctatttcttttccccatgtcaaaaattcaaaacaactgatttttaaaatattctctctccattcaacaaatttcaaattatcagcattaatgggaagaactatgttttccatatcgctaatcttagtatttgcaaacatctcaatgccatagccgtctgtaactaaaatttttccaaatggtgtgactgttatatctacatattctggttgtgaataatattccataatttcaccaccataaatatctagcacatacatataatcagaagtcaaaacaacaataattcctaatgttgtagaacaagatacccctctatatttacctctaaattcaccacaccaaatatcatcttcttcggtaaattttatccatgtccaatcagttgaattccatggactttttatatcataaattttttcaatatattcccctgaatatggttgttgaatatattctgctctaaaaatcatttaaacgcatctccaaaataccgatttttattgctaacaagcagacattatctttcatataaaatatgtaaatctccatcaacaaatccaatacctattgcttgatatttttttaaacttccagcatatttcccaaaagaaaggtattcattcaataaatcaataaaaaatgtttccattgatttccaatcactttcacgctctatcataaaaggattatctcttgtagcaaatacttcatcacaagcccaatcgtcattatccctatcgaatgaaaatgtgccgactaattcaatagaccatttattatctgtatcttcatataaattaaagttaatcgcttttatttcactattcaattcattctttaagatcaaatctaaccattcaaagaaatctttgttgtttttattcggttttaatttatcaaataatcccatacttcgacctccacaaatatcgatttctcgatttcaaaaactagaagttatctttttcttcctaaatatcggcatacttttgatttgtattgcaggtactcatttccaaatgcttctatcaaaaaatcttcctctacattgactatctgtaaatgaaaaaataccactgcaaaacctgtggcaaagcaaaggaaccaattaaagaacgaaaacaatattcctatatacattaaatcaaaacccaaaaatgcaggatttctgctaatagaatagatgcccgttgttaccaaattggtcttttcttctttttgcacacctgctctccaattctccttcatctgtgtaacagaaacaataaaagcaagtacaccgaacattgttattacaactcctgtaaattgcaacacaatatgtgctgtttccgaataaaaaacaatactgataatctgtattacaggaagcaaatatgtgattattttaagagctacttctataaatttgacaaatccctcttttccttttcctaattggtctgtctttatgccttgctttttctgactaatcagctttgcaaaatagcagatgtagaacactgccatcagtgaaattgtaacaatttttattatcatcgtgtacctccaaattccgatttctcaattccaaaaactggaatttatataattatctctctaactttccccattttataggctttcccgcctgtccattagtgaaatgatatgtagtttcccttatttttacccttatgagataatcacaagggaaataagggaatttttttaatcattgcctaccactttatcaagaagcctaactgattttcgtttagcatctcttgtggagtgagcatagacattcattgtggtacttacatctgagtgtcctaacagttcctgcacatcttttggggcagctccatttgctaaaaggttgcttgtataggtgtgacgtaactggtggaaatgaaagccttcaaatccctctaatgtttttgccacctttctgcaaacagtccccaaagtagttggaagttccagacaaccatccggtcttaaacagacgaaagaaatttctttataatctgccgggacttcctctgttctgtctaagcaataatattcgtagtacactctgtttttctctttgaccgctttgtagtagttcgtgtgataaagttctccgtactgcattcgattttttaactgctctttccgggcattacggaaaatctctaccagcgtatctccaaaatcaacaatcctcacttttttccgcttggttggtccgatgatatatttgcgctttgagccatcgtatcggatgctacgtcttatggtaaggcattgttcttccagatttacgtcctgccacgccaaaccgcaggcttctccaatacgaagcccggcataataggctatctggattggaagtattgcggctgggttcttttttttcagataagcaagcaatctttcataatcttctcgtgaaattggttggatatttccgtccatgtcctcgtctgaaaacaaatcaacttcatccgtctgataccgcagtttaatatactgcatgggattaaacgtaatatactgttttggaaatactgcaaagcggaaggactgctgcatgactgcggaaaaagaatggatgtaatctttgctgtaaccctttctctcttttccgtcgggatgaactcccccgaaggaaagcaaatcaaaaaaggattgcaaatgctcagaggttacattttttaatttccgttctgccagcggatgtttcttaatatttcggattgttccgaggtaattctccacagtaccattgctgagcgtacctgtttttaattcctcctctgcccacacatccaaaagttgtccgactgtgagattttccgctttggcaacaaatttctttttctcataatcatccattgcctgacggagcagtttttcagtttcacttttgctttctgttccaacgcattctttctgaacaagattgccgcttgcgtcctctacatagaagcggtagtaccatttctttcctttttttcttacagatccttttgccataatcgtatatctcctttcgatattagacaatcggaactgatgaaatgcttcgtgcgtgtaagtatatcataactccggttgtcttactataccgattcggaatcttcgtataagacttctgataaaagatttgcaagcctttgttctgctgtttttggtttcttggaatagagccttacaacgtccgccatctcattaagagcattgatggtaggagtgatttcccttaagaacataatctcattatattcctcattcgattcaaaccctattgttttggcaatatccgtctgacctgcatttcccttgaagtttttgcaggcgaactggaaggaatccaaaaacagaccatattgttttaacatcagcagtaataaatcttttgaaaaagcatcttcttctttggtaagggcaagcggtaactgttccagaatatctcccatcgcatcacgaatctgtaattctctcttatccgtaatatcggtttcatattcatctgtttcccctttgagccattccacagatacatggagtgcttccgaaagaccttccaacaccatttttttcgtattgtcaatcgaaccattctcataacgcaggattgtagaagcggtaacacccatcttttctgcgacataaggctgtgtcagattcaattccagacggcgctgttttactctgctccctatcagcttgcgtaattctttatctttcatgctgactgcctcctttttctgtatgtatgaattatagcattgtttttctaaaattgcaatatgcaatataaagtttatttttaacatttcgtaacgcttgacaaaaagatgtgaaaaggatatacttgcatcacaagaattgcataatgcaatttgtaaggaggtgattatatgacgcaaagaaaaattgcattatccatcgaagaagctgctgactatacgggaatcggcagaaacaccttaagacagcttgtagaatggaagaaacttccagtattaaaggttggtcgcaaagtcctgattaaaaccgatattctggaaatgtttatggaagctaatgaaggtcgtgatttgagggatagaggaaatgtaaaagctgtaacaagaactgtggcaaattaaaaaggcggcttccaaagaaaccgccaaaggttctatcagaccaaagccatgatatacctacacgcaagaagattataccatgtgcttcttctgatacgcaaccgagaacttatgtttgcaaaagaaaggagaatgtaataatggcaaaatcaacaaaaagttatgaagaacgaatgcttgaaatggaaaaaaaggaacaggaaagccttgaaaaagcaaaacgatatgcagcacagaagaaagaacttctgaaacgaaagaaaaccgaggaaagtaaaaaacgaacccataggctctgtcagattggcggtgcggtggaatccgttcttggtgctcctattgaggaagaagacatcccaaagctgattgtttttctgaaaaggcaggaagccaatgggagatttttctcaaaagcaatgcagaaagaaaccaataccgatatggaggaagtgtaatggcagaggggatgagtttttcattcccttcattgctttttcatgaagggcgcacttatggacaaccagaggtcgtcccaataagtttgccacaagtggcaaccggtctgcgctcacgcttgccgggctcgttccgtcggcggggctttcagccagacctgctcatgccgcaggaggcactcttcgccagagaggcgcattccatgcaggctgctatgcgcagggcactcttacgcagagggcgttccggcaatgctgctttttctaaaactgaaagcaatgttgccggaaatttatgccggatacgtcagaaaggaggaatccagacatggcgatttttcattacacaatcaaaatagtcggacgaagtaaagggaaatctgttatctccgcttccgcatatctcaatggggatgtgatgaaaaacgaggaaacagggagaatcagttattacacttctaaaaaagaagtggtctacacccggctgatgatgtgcgaaaacgcacctcctgaatggcagatagtaccagaagaaaatataaaacgctttcaaaaatctgtccgatacaaaaggtcagaagataaagaagctgctttaaaaaaattcaaaatcacatttcagaaacagaggttatggaatgaggtattgaagattgaaaaaaatgcagatgcccaacttggcaggtcatttgaatttgccctccccaaagaatggagcagacaggaacaaattcaatatacaaccgactatatccaaaaaacttttgtagatagaggaatgtgcgctgattggagtatccacgacaaaggggatggcaacccccatgtccatctgcttctaactatgcgtccttttaacccggatcattcttggggaaagaaagaagtcaaggattgggattttgtcagagataaaaacggaaatatcgtgattgatgaatcccatccgaactggtggcaggataagaaaaaccctgaccgtcatggaatccgtatccctgtattagacgaaaacggaattcagaagattggagtaagaaaccgcctgcaatggaaacgggtgctgaccgatgctactggatggaacaatcaaaaaaattgtgaactgtggcggagtgaatgggcaaaggtatgtaatgaacatctgcctttgcataatcaagttgatcatcgttcttatgaaaagcagggaaaactccagattcctaccatccatgaaggagctgacgcaagaaagattgaacaaaagttttttgccgggcaggaaataaaaggctcgtggaaagtagcggaaaatcaaatcataaaacaacaaaacacgttattgcaaaagatactaaacacctttgggaaagtatcgggtgcattatcattatggaaggagcgattaaatgacattagaagaaagccgggaaattatacccttaatggaatccatgattggtcaaatcgaagaacagcagaacctaatggcagaaatgattctggaaatgcagaaccgggacactcaactctctcttatgcaaaaacagaatcagaaattacaaaaattaaacaacgagttatccgagctgctcaacattttgccaaataccgaggaactgctttccaagatggaagaacagaaaacgaagatagagcttttggaaaacgaaaatcagcaatggcagaaattggcacagaagctgaacaccgaaaacagtttattactgaaacagaacaccgaattgctgaactggaacagcagatagagaaaggacgtgatatagatgaacgaatccagagaatcaaagaacgccgaacagttggaagaacttctgctcttgaccgaggagatacaggcagaactggaacagaaagaccagcttatcgtggaactgaagacgcagctcaacgaatctctgaccttgaacgagaaattaaacaaagagaacagagcattgaatattcaatcattaaagaacgacttgaagatggcagacaaagcattgcggatcgagaaagaaaagctgcgaagcgcaaacgtcacgatagaggattgtcaagataaaatacgctgcttaacacaggaacgggattatgcccggacacatcagaaaatcgtagagataccggtagaaaagccggtactctatgaaaaatgtgaagcccgtgaccgggcagcctatcagaatgcaaaaacgaaatacgaaacacaaaaagagcgacttgccggacagtataaagcaaaaacggtaatgttccaaacaaccttgtttcttcttgcatggtattcgctgatatccactctttttcaggcaatacagtcagatgtgtttctttccgattgtaaatcattcttcaatgatttagcatcattcatacaaacctttgtcggatggacgattgatgccgggcattctgcggcacagattagtacaaaaattccaaatgcttttatagccggaatggtatattggttattgctaatattgattgtaggaatatgtatggcaggaacagggatgctggcgatactgatagaaataaaggttatagaattatataagaaaaactgttgggatgttattactctactaatgatactgacaagtgttgctattgtcatttattttggagaatcaatcaaaaaagtactgtcagtaaatcttctattgcttttcgtactttcgcagggcgcatatgttggaattagatgttatcttaaagtttggttagaaaaaagaccatattagtattttcaacttactgtatagacagtaaaattactccatactagcctagtgaaaatttactgtatgaaaagaagtattacagagaaaaaaggctgtaaaaacaggaacagccagcccgaaagaatttacggactggctgtatcagcagagtaatgtaattgttgagctgaccgagatatgaaaaactttctatcgtcaatttcgcattattgcaataacagattgcttcttccatgaatgaataagcaatattgtcatcaaactttcaagcataaacatagcaacagcaaaaagagtaaaagcaacaaccggaaatacaaatcccgtagacatgcctgcatttttcaaaaatataccgattgcatatccgccggggattccaacaacagcagttataagcaatgcaatcaaagtagtaaaaagaccttccatcataaatgcttgctccaactgcttatttgtcataccaatagattttagtgtgcccatttcctgtttctgtgataaaagatttgtcacagtaagattgatttgattgatgaccgcaaatatccacaagatggctgcaatcgcataagctaatgtaaaacctgcacgattgtctgattggtgttctacaataaaatcttgaagggtttgtaagcgaacatccctattgtcagaaacgagtaatttgagttcttgctcgattatctcctgatattcagcttctgcttgtatttcgattgcgtatatacagtcataacctgcaagttctttgagcatattttccggcattctgaaaatatagccacccattccatcattgctggaagtgattgcaccaattttgaatgcttttgttattgttttaccactatgatttttgaaattaaaggtcacagtatccccaatttgaggtttccaatggtaaacatcataaatacgttcggggtcacttacaactaattctgtatcatcagtaatatttccagacaaaatagctgcatttagcgatgccaaatccttttcattatagccgagcagcaaggtgctatctgaaatatcattgtctgttgagtaatcaactggtaaggtagcataagtaaatatattgctaactccctccatatctccaacacgctttacataatcagaaaaatattctttctgcaagagagcatccagattttcactttcattttctaaatcaatgctgattttgaaatctccgtacttcatatcccaataacgagccatactctcggcattaaaagaactctgataacttgctgcaaggaaaaatataactccgcacagtcccaatgataaaatggtcaatagagatttttttctgtttctgaaaaagctgattttcgctaaatatacgggcgtaatacgatgtcttttgtgagtgcggtaatttacaattcccacttgatttttcagggcagaaattggagaagtattcgctgcaatttttgctggtttacgaacactaatataaacaagcagtattccaaaaaggcatgcgccacatagagaaacaataaatgcaaatactgaccaaccttttgattgcagacaatagctgatgatcgttcccatgatactaccaattaaaatccccggaactgcaagcatatatccctgtttaagaactattttataaatttgctttttacttgcccctattgttcgaagctgtccgaactcagcaactttttgtccaaccgaaatatagaaaatgctgtaaatcacaagagcggcagctaaaaacaaaatggcagcaactgcaccatataccgcataattactgagggacaaagttgtatttacataatcatagtaactgctgactgtccaattattcagtccagtctcctctgaaatttgagataatatttctgttgcttcatcttttataagggtatctgcattttcaagccaaacatatccattaagcaggtcatttccacgtaattcccggcatttttcaagcgaaacaaaaacaggataagcggtagaagttttatcatggtaaatgccaacaatagtataattcttcaaagtgccatccagattcaactgaactatggcgttgatttccggagacttattttcactggcaaaaaaggcatctgtaacagcaatttcatttgctttctctggatattttccgtcaaaggcaggaatcaaattaagcatgtcatcatcataataaatcaaagacagttctttagaattttctttcactgttttgatattacaagaaagtcctacactttttacttcttcgtttgctaacagcttttctttactgtcccgcgtaatgtcaaagaaaatcccttgatgtaatccttcgatttctttctgattttgataaatgatattttgcaccgtgagcaacgacatcattatcatagcaacggctacaataattgccgaaaggcaaaataagtttttcttcttatcaaaacgcacactttttcgtgctaattttttaattactgcactggtatcattttcaaaaggataattcataattcccacctcctttagcctacaattttaccatcttcaatccgcacaatgcggtctgcgagttgggcgatctcgttgttgtgagtaatcattacaatggtctgattaaattctccgctggtacgcttcaaaagccctaacacatctgcactggtcttgctatcaagatttccggtcggttcatcagcaaggataatcgcaggctttgtaattaaagctcgtgcaatcgctacacgctgctgttgaccccctgaaagattattcggcatattttccagtttatcttctaaagccaacatatacacaacttcgtccataaatttctggtctactgtatcgccatccagttccacaggcaggacgatattttcatatacattcaaaatcggaaccagattataattttggaagataaatccgatgttacgacggcggaaaattgtcaattcatcatcattcttttttgcaagttcttctccccgtacaatcacgctgccggaagtgggggtatcaagtcctcccatcatgtgaagcaatgtagacttgccgctgccggaagttccaactacggcaacaaattctccctgttccacagtaaaatttacaccattaagggcacgagtaatattgggttctgtgccgtaatacttctttaagtcgattgtttgtaaaatgctcatattcaaatgctcctttcaaggctttctatctgttgataaagccattgtaaaccacaaatgttacacaaatgtccgagatagaaaaaaattttatcgaaaatcagggtgaaatgttacaacgctcggacatttcaaaaaaagtggttatatcttaccttacaggaagcataatagaaaattctgagccttgccccagctctgaaacgaccttgatatagcccccttgccttgttacaatctcacgagccaaatacaaacctattcccacaccctgttgatcgtgtacttcttcctcacgatagaagcgccggaagatggcagcctgattgctttctgaaatgcccttgccggtgtcggtcactttgacctctacgtacatttcccactgaaccactgatacagaaatctttccacctgacggagtgtattttactgcattgtccagcagattgaaaagggcttcgcttgtccacttgctgtcatgggagattatcaaattttccgggcaatccacggatacagcaatttcttttttctctgcagcatatacaatactgctcatggcttgtgcaagcgtatggaataagctgctgtctttcttttctaatcgtattgctccggtttccaaccgggacgttttaaccagtgcttggaacagaaaatccagtttatcagtctgactacgtatgccttgtaaaaagtccatccgttcttcttctgaaacaggctttgttaaaagtgtgtccgttaccatttgcaaattgctgacaggcgttttaacttgatgtgaaatatcagaaatcagcatttgaagctcctgtcgttccatgtctaccttgtgccggtttttctgcataatctcatacaaccgaattaagcggtggttgatacgggcaaaaagagtttcactatcatttgacttttgtaattcctcgtttccatcaatcatgttgtccagcgtccggcacaaattagaagtaaaatgagaaaggcgttttccaaaaatcagcaccaatagccaaatccagaaaaacgcacagagtgtcaatgttccacccactataaaaattcgtatatcctgcattataccgccgaaaataccggtaattaccagcatagagaaaaccatgccagcactaaccagtctacaaattttcttagcagaaaggttattcagattcatttcttttcgcctcctgtccattgataccccataccataaaccgttttgatatatgtgtcgccatccgcttcaatcttactgcgaatacgactgatagaagtagtaagggtatgttcatctacatatttttcatcaacatcccacagtttttctaaaaattgttggcgagtaagtacctgcttcggatttttaagaaataggttcaacattttatattccatcgcagaaagtgctaatggtttcccgtttaaacttgcagattgttccgaaaaatccagaaacaagctaccatcctcgtaaatatccttagctggtttgtgatgctccaacatagcaaacatggctttgatttttcgctgcaaagcactaatcgaaaaaggtttcgtgatataatccactgcaccagcttcatatccccgtatctgattgctttcctgatcgttggcagttagaaatataactactgtatcaggatgctctggcttgataagacggcataggtcataaccatttccgtctggtaaatttatatccagcaataccaaatcaaaaatgtttgtttttaatgattcagcggctgtccttgcattcagaacagaagttattgtgtaaccgtccaattccaaattataagtaagcgttttattcaaaagattatcatcttcgacaattaaaatatgcttcatattatcacttccttttctttttgcagatagtataacaggcaaatgtccgagaattgttacaaggacaaatatatttttcattttacagcttttttctgtgtactgcaattttataaaagaaaggacagcagtgtcaaattgctgtcctttcttttatcatagctggtagtgtataagcgtgggttcatcatatcgggtgtggtatctttaactataggaaactccctacaacactatctcacttcttgcttaataaagttctaatgaatcttctgcatccacccacatctgtaaattgccatcaagatataatcttgcatattccaaaggctcatccacagctaatgaagtaagcgcacattctgatccatatgtggtttttaaatttttttcagcttcccagcaatcaatgcgaagcatatatccagcacttgtgtaaacatcaatactatcgtggtttatattatattctgcataaattgttctcatcgtatcttatctccattttcttttgataatcagttacagagttaaatatcgaaaacatttcaatcagttcaccatgtcgttattgttatatgttatattgtgttatgaaattttctttcccttaatttttcccatattaaggttcatgaaaagcaatgggaaaatgtaacacaagggaaagagtaagggaaagttcacttgctacaaacttagtattttcaagggtttgcgaagaatttgataatcaaatataacagttattaaatttcctaaaatatgtgaaatatcaactggaattgttctgcttagtttggcaactcgctttcttcaacgggaactgcctctaagtcagtgttgctccaataagagctaatatctgcacttgtaaagtattcaaaattatctgtggaagatttcagattgcctgtctttactccatcgcagccataaatcagttcataacttgttccatcagaaaggttaaatctgaaactggttatctctgctccagcggtttcctctacttctttgagttccagggatagcccctcaaacatatcatacaagttctttatggtttcttcggcaacaatgaccttcttttctgctgacacaggtgctccaacaaagtgatacatttctatattttcaacatcacctacctcaaaaggtaaatcaatattgactgtcttgttgttgcacccaaccaagccaagcacacaaaccactgctaaaactaatgctatcaactttttcatacaatcaacctccttcgtcaaattccgattgagatttcacctgttttagggaatttaataactgttatattttgttattaaattctctgcaaacccttccctaaattttttatttaaattccactgctcgcttatgtggtagaatttactcccgcacagttgatatttactctttcatataagagtgataggcttatctttccttctgacagcagttggaggaataatactatgagtaaatatatacccggtaatcagaaacacttaactctggatgatcgtatttacatccagaatgagctttccaaaggtacttcttttaaggacatcgcacgcttcctctgtaaggatcccactaccatttccaaagaggtgaaagcgcaccgcctgtccgactggtatcacaaaggtaccttttataatgccaaaaacttttgtgtccaccgctaccattgtaaaaagaccaatgcctgtgggaaaatccttctttgcggtatcaagtgtacttcctgccctacctgcaaccagacctgccctgactttgaaaaggaacgttgcagcaggctcgataaagctccttatgtctgcaatggctgtgataaacagatttcccattgcaccattgctcacaaatacacttacaatgccaggtttgctgaccgcaaatatcgggaatgccttaaggagtcccgctccggtatcagcatgaccagacaggaacttcaccagaaagacaggatcatcagtcctctgatcgagcagggacagtctccttaccagatcattacgaaccatccggaactgaagctgtctgtgcgtagcgtttacacctatctcgacatggggatcctgaccgcaagaaacattgatttgaagcgtaaagtgaaattcaaaccacgaaaggttcacaaaacacagatctctgaccgccgtgttttccagaaccggacctacgccgatttccaacagttagaactgtcttcctttgtggaaatggataccgtgcattctgcctccggttcctccaaaacactgcttactttcttttttacaagagaaaagctgtttcttgcattcctgatgaaccgtaacacagagggtgctgtaagactcatctttgaccgattggaaaagcgctttggtacttatgattttcagacactgtttgaatacattctcactgacaggggatccgagtttggagatccggaatccctggaaaccggttttacagggatccagcgtaccagtatctattactgcgaccctatgcgcagtgggcagaaaggcggtctagagcaggcacataccatgctccggatgatcctgcccaaaaagacaaactttgagtttctgacccagtgggatgtcaacctgatcgtaagccatatcaattccaccccgagagaaagccttcagggcagaaccccttacgatgtagcactggaaactctgggagaagaaaccttaaaagcatttcagctcaggcgcattgcccctgacgaggtcaatctgacgcccaagctgatacgctttacccgataattcattgaaaaaacctgctgtcagactggaagtaaacttttcacattttttgaatgtggccggtggaatttagcctgacacactaccttccagtggcttgtttgctatacagaaaaacagagaatttcgccatgaattactatgattataacagaaatccaatattttttctctaaaattattcgatttcaagcaatttttaaagacacggtggaatttacctgtgcactggaatttaaaatttcaagtcagcttagccttatccgccttttattataataaaaataagcatgcggatacatacataatgtatctacatgcttatagtacaagggacaccaggaagtccgctcattgtctgtgacttgtcggacacactccggaagtgtccaaacgcggaagagacacggaatccgatgcaaacatccagcaggaagaaatgctcacatttttctcaaacgaatgttccatctgcatttccagctgaaatctgcgtggtgtgcttcttataatattccttatcgactcaaggcagctgcccgcccgatgcagcagtccctccttttacaggataaatcgctcgatcacctcggcgatcgcattgtgattgttgtcgtgctccgtcacataatccgctgcggctttcacctccggcgtggcattctttaccgctaccccgatatgcgccgcattaagcattgcaatatcattctcctcatctcccaccgctaccgtacagtctagcggaagattcagcatcttcgtaagacaggacacaccggttcccttgctggtatcaagcggacagtattccagatactctctgcaggagaaaaagctggtacattttcccttttcccattccagattcttctcgcggaaccgcgcgagacgccccgtattttttaaatcaatcatgagaaccttctgcggctcctcctccagcagatccagcacattcgccgaaagcttgtaggaaagtcctgtttttttccggtaatactcaagctctgccgtatgtcttgtggtaataatctcggtattattataggtctgcgcataaattcccgcctttgcggctctctcaaagagttcctgcgtcacctcaatcgggagcgagcgttttaacagcacccggtccgcagcgcagtcgtagagtaccgcaccgttaaaggcaatcatatagcagcccggctgcgtcagctccagttctctcgcaaccgccctgccgctctccaccggacgcccggtggaaagtacaatgtcgtgcccggcaagaagcattttctggatggcggcccggttttcttcggatactgttttgtcgtcagagagcagcgtcgcatccagatcaacaaacaaaatcttgtgattcatactcattcctcccatcctgcttttagcccatcatatgtcctgcagcgttcctactctgccggttctgccgggacaaatacacgctcgcggtagacatgatctgtctttggcaccgccgcaaccgcctcctcgcagaactgcttctgggaattgacaagcactttccctcttctgtctattttctcatattccccgtccggctttaacacatgggctttggtattgtccgcaagttccacgtccagaatatgctttaccttttcttttaacgtatcgtccagcaccgggaataaaatttccacacgacggtccagatttcgcggcatccagtccgcgcttcccatatagagttcctcctccccgtcatttaagaagaagaaaatacggctgtgctccaggaaattcccgacgatggaacgcacatggatattctcgctgattcccgggattccgacctttaagcagcagattccgcggacgatcagttcgatctttacgccggccgccgacgcctcgtagagcgcggcaataatgccctcgtcacacagggaattcatcttggcaacgattttcgccggctttccctcgcgcgcatgctttgtctcacgtgcaatcaggcgcataaaacgggtgcgcagccagatcggcgccagcaccagttcgttccaggaaagcggctcagaatatccggaaagcatattaaacaccgcggtcgcatcctccccgatcgcctcattgcaggtaaagattccgcagtccgtgtagagctttgccgtagaatcgttgtaattgccggttccaagatgcacatagcgcctgatgccgtcttcctcgcggcgcacaacaagcgcaatcttgctgtgcgtcttaagaccgaccagaccgtagatgacatggcagcccgcctgctctaacttcttcgcccacacaatgttattttcctcgtcaaaccgtgctttcagctccacgagcaccgacacctgttttccgttctccgccgcctgcgcgagagatgcgataatcggtgaattgccgctgacacggtagagcgtctgcttgatggcaagaacgtccggatccgacgccgcctgccggataaaatcgaccacaggatcaaacgtctcatacggatgatgcagcagaatgtcgccgccccggattgcctcaaagatatcctcccccggctcaatctccggcacgcgctgcggcttatacggttcgtagcgcagggaatcgcacccggagagcccatacatcttcatcagaaatgtcaggtcaatcggtccggatatctgaaaaatatcctcctccgccactttcagttcatcctttaaaaagcgcagcagcttcttgtccacggaagcttccacttccagacggatgacttctccccactgtctcttttttaactgtttctggatctcttttaaaaggtctgccgcctcgtcctcatcgatcggcagatccgcgttacgcatgacgcggtacggatgtgcgcagagcacatggtagtttaaaaacagcttatcaatatttttctcgataatctgctccaggagaataaaggtgcgtccctccacctccccggaattctccgacgtatctgccgggatcggcaccaggcgaggcagtaccccaggcacctgcaccgttgcaaattccaccgcgtccttatgcttttcatccttcttgctggaaagcagcgccgcgatgttgagcgtcttattgcggatcagcgggaacgggcgcgatgcgtccaccgccatcggcgtcaataccggatagacgtcctcctcaaagtagcggtccacgtacgccgcctgctcagccgtcagttcctcgtatttttcaataatgtgtattccgttggctgccatcagcggaacgagggagcggttatacgtgttgtactggctctcgacgagttttctggtcgccgtgttgatccggtcgagctgctccgatgccgtcatgcccgcaatatcccgcttgcggtagtccgcatgtaccatatcctttaacgacgcgacccggaccatgaagaattcgtccaggttcgacgacgtgatgctcacgaatttgagccgttctaacagcggaatgctcttatcctttgcctcgttgagcacgcgggcgtcaaacttcagccagcttagctctctgttctcgtaatattccggcaaatggaattcgtttttcttttctttttccatgtatcatccctccacgtccttacgaatagacacgtttttccttcacgaccggcttgatgctgaaaatgcgctcaaaataagccgtcttggaagcgaacagcgccttctccagcgcaatgtcctcatccgtctcgatcgtaatgatcagttctttgtcgcgaagctgtgcttttacgtttttaaacttctgtttgtggctgcgatccatcgcattggaaacgcgcagaatggcggataactttgccaccgtaagaaaactctgctggtcgagccggtccgccacatcctcataatcggcaagcggatagctgttgtagagcactgtccccgcaacgatctcacgctccagatgcgacagtcccataatttccgaggacatgatgatgtcgtatgcgcactgcggggcattggcaaagctgatatattttccgcagtcgtgcaaaatcgccgcgacctgcagcaacagccgttccctctttccgagaccgtgttgttttttcatcgtgtcgaacagaagcatcgccatctggcttaacgcttcgatgtgcggcgaataactcatataacgtctcgagagactttccgcagccgaaataatatcctggtcaaaatcatgcgcaggcttatagatacggttcttctgcgcgtagtcgcaggcgattccgtcgctgacgatcactcccggcgcccacagttcctttgcgcccagccctcttgccatgcacttgcagatgatgatataaggcacgatcagcggatcgttctcgttggagagccccagttcctccgcgatctcctccagactctttttgccgagctgttccatgtattggacgaacttctcaattgacacggtattcttgttgtggttcttctcaaggcggcagaccagttccgcaatataatcgccgatcacaatcagatattcgatctcctggttttccagatacatcgccttgaaaacttccatctcctttaccaccatctcctcgatctgcagttcatactgcgccaggttccggctcttttttgcaagctgttcccgcatgcgcatggtgccgagccccagatgctgggtggtcagcacctttccctttgagaacacggtaatctgaagtcccgatccactgacgtccaccaccgctgcgcttctgccgatgaaatgctcaaactcctcgcgcatcgccaccgacttgtagctgataaaacggtgctccgagttgctcaacacatgtacggtcagaccggtacgcagcctgatctgatccaggataaaaagttcattgtccacatcgcggagtaccgccgacgcatacgcctcgtacgcatccacccggtactctttcatgatctgcgcaaattcccgcagggtatcgcagagtgcctccaccagttcatagccgatgctgcccttggagtacgcatccgcccccagctcgattctgctgcgcacatagtcgatatcgcgtatttttttcttggcagacaattcaaatatcttgaggctcacttcatacgaaccgatataaattgccgcaaacgtatggattgccataaatccgccctcctcttttattgttttccaagcagataattgataaactgctgtgccgtccttcccgaaagtcctccgtgggcaagttcccacttgttggcctcaagaagcagttcctcctgcaccatccgcacgccgtatttgtccgcgagcgtcgtgacaatcttctggaactccttcttatccggcgcgccgtaatagattgtcacgccgaagcgtgcatagagggacagcttttcctgcaccgtgtcggaagtgtgcatatcctcccgcacctcttccttgtcggagaacttctcacggatcagatgtctgcggttggaggtcgcataaattaacacattatccggctttttctccagaccgccctcaatgactgccttcagatacttatattcaatctcaaattcctcgaacgaaagatcgtccatatagatgataaacttgtagttgcggttcttgatctgttcaatcacatcattcaggtcacagaactgatgcttgtaaacctcaatcaggcggaggcctctgtcgtaatactggttggcgatcgccttgatgcttgtggactttccggttcccgcatcaccgtacagcagacagttgttggcttccttcccgctcacaaacgcctccgtattgtcgaccagcttctgctttgcaagctcgtagccgaccagatcatccagctttacatgcgcgatattggtgatcggaataatctgtgccccgtcatctgtgtgtctgatgcggaatgccttgtgcagacccagttttccgactccgaattccccgtaaaatgccgtgaccgcctgtttaaattcttctgcatccgccgctgcctccagatgacggcagagctctgcgatccggtctctgatccgcttgttgaacaattttcccgcgtccgcggtctcctcatagtgcagcaaagcgtccatgcagtccacggaaaaatagttgccgagcaccgaaaggtcaaagtcaaacaactctttcatgatggcaaaatcgtgccgcgccacctcgttgatggagccttttatctccccgcggatctcgcacgccctgctgtatgcattctcgttattcacaagcaaaaaagccaggaaattgtgccagagattgccggaaaatccgtggctgaccgcaagctccatcagttttttgaggcattcatagaataatccctcaacatcttctttattatagtattcattctgatagttctccatgacccaggtaaagtcatagaataactgctcgttttcaaaatccctgtagaggatcagattcttcgttgtcttcatcttcccacattcctcactttacgcttcgtaattccccagaatctgcagtctggtcgtctcttccgacaatcccagcagtgcattctgcaccgccggatcgttcagattcccctcaaagtctacaaagaaccggtattcccagttgcgctccggcagcggtctggactcgatgtgatccatgttgatcccgttatagatcagatgggacagcatgtggtagagagaaccggtctcatgcgctccctcaaagcagatactgatcttattcgccttcctggtaaacacatgttttcccatcacgatgatgaatctggttgcattctgcttgttgtcctgaatgccttcctccagtacatcaagaccgtagatctccgccgtaagacggcttgcaatggcagctttgtgccgcataccgtccttcctgactttctgtgccgccatcgcggtattttttaagctgtgcttctcccactcccgatgcccttctaagtatctcgcacactgcatcagtgcctgcggatgcgagtatacatccgtgatatcggaaagcttcgctcccggcacgccgagcagggcatgttcgatcttgataatctgctcgcccacgatgcagtgtccatactccaccatgagatcataattctcagagacaatccctgcagatgaattctcaatcggcagcaccgcataatccgcgtccccgctggcgatcgcctccatggcgtccctccaggtctccacatgatagctgttccccgcatcctcaccgaaatactgctttaacgcgagctgcgtgtaggcgccctccgtcccctgaaagacaatgcgcgcgtttttataatccagcgcatccagctcttcaaaatccggcttttcatatatgccgtgctccgtcatcagctgatactggcgctttctgctgatcgacatgatctgctcaaacagctcccggattccgtgccggttgaacgcgctgtcgccgagcgccgaaagcgtcgcaagcttttccatttcacggtctttgtcaaaaacttttttgcccgtctctatcttatattccgccacctcagccgcgatctgcatccgctgctgatacagcgcaacgatctgcttgtcaatgacatcaatctcatctctcaactctaatagattcttcatagtgctccttaccgtctgacttccttttcgtatcagggcatccgccgggtgctcttttgtgccgactccgccttagtttataatatagtacattaacgtgctgatgacaagagaacccttgcaagttattagacgaaaatgttataatttccatgattatattttatcggcatttcagacgaaagaaggaatcattccatgaaaaaaaagatttccattatcattgctgtcatcgtcattatcgcgcttatcgcagcggctgccattttccactatctctccaaccggactcattttaatgagggttacgtgaacggcaacaccgctggcaacctctacaacggcggtctcttctgcgagtacgacggcacggtatatttttccaacccgtccgacggcggaaagctgtattcgatgtctccggacggaagcaatctggccaagctctgtgatgacacggtatcctacatcaacgcggacgaacattatctctactatgtgcgcaacaatccgggagcaacgggcgccgctctctcctttctctctgtcaacaccgacagtctctgccgcattgacagggaaggcggcgatgactccgttctgattctggattcggcgccgtgcctctacgcttccctctacgggaattatatttactatatccgctatgatgaatccgagggttccacactttataaggtaaaaatcgacggttccggctgcaagcaggtcgacaccgctcccgactttacctgctcggccaacggcgaatatatgtattacaacggaaccgacagcgatcactatatctggcggctcaataccacggacgactcaaagggcatgctctacggcgggaactgttatatgccgactgtcatagacgataccaccgcctatttcatggactgcgacagcaactacgcgatcgcccgcacggatcttgccaccggtgagaagacacttctgtccgaggaccgcgtggactggtacaacctctacggggattatatctacttccagaaaaacgattccgaacatccgtgtctcggattcatgcgcacggacggcagcggttacaccacactgttcgagggaaatttcaaggacattacaatcacttccgaatatgtatactttcgtgatttttccacagaccagagctactgcgttccgctcggctcctccgcctctccggtcgcctttgatccgggcgtcgtcgaagactgatgcagcatagaattgccgcaataagcatagacctctttcgagcgataagtaatattacaggaaatagatacttaaaagttccagataaacatgcggcgacaaattctgaccgcaaaatccggtatttctaaccatgccgcagctggcatccgtgatgatccgtgtctttccaagtttggagcactccacggactgtgtccgcaaaccggcagacaattttaggacttttttgtgtgtcccttatggacacctctgaacaaaacataaccgcgcgaagccgatgtctgagtcggcatctgccttattttcannnnnnnnnnnnnnnnnnnnnnnnnnnnnnnnnnnnnnnnnnnnnnnnnnnnnnnnnnnnnnnnnnnnnnnnnnnnnnnnnnnnnnnnnnnnnnnnnnnnnnnnnnnnnnnnnnnnnnnnnnnnnnnnnnnnnnnnnnnnnnnnnnnnnnnnnnnnnnnnnnnnnnnnnnnnnnnnnnnnnnnnnnnnnnnnnnnnnnnnnnntatgcttattgcgacaattccttttcattatgctcgttttcgtcggaacagcttcgtgtccgtccgctaactctcctgctcttcgtctgcggagccttcttccaccgcctcgatatacttggcgaacgtatgcttatagtacattccaaagaaataccccatcagaccgattccatagatcagcgtcaggaaattggcaagcagcgtggttgtgttcacccagacaaacagaatcatcaagattgcaagctggatcgtcgtcttcatgttgcgcattgcgacaaaaaaggaataccggatcgtcgccttgaccggattcacaaactttgcctgcacgccgaacacatagaggagcgacagaaaatacggtacaaacagaattgccgccactccctgcatcagctgcccgaaggaattgccggcacgaccgcccaacaggaagtcgcccgccaggaatgcacccgctgccagataaataaaaaacagcgccgtcgcctgtttaaagttctccttaaacgacgagaaaaaattctgatgccagtacccttcattgtccgaaagcttcatgctggtgtaaatcagggcggtcgtcgatgccccgatcgtaaacaccggcagggaacagatcagccagagcagattcaataaaaatatctttccgattttatcaatggtacgccaaaccacgttgtcgagatcaaaaaatctatcccacatggcactcctcccataatctctgaatgtattcgcgcgatgccacggcattttccggcacggtgttctctaaggttgcatggatatacggcttgcgttctttcataaagcggatgatcctgtcatagttcatctcgccggttccggctgccaccgataccaggctgttattctccaccttaaaatccttgatatgtaccatcgcaatatcctcgccaagcacatcgatcgcttctgctattatagcatccctgtccttgtaattgcaaatatcaagcagattgaccggatcgaaaatgatctgaaggttcggtgaaccgatcgcgtcaagcacctttctcgcccgcttcggattgcagacaatatgcttgtacaccggctcgatcgcaacgatcacgcccattttttccgcataggaaaccaccggacacaggttgttgataaagatctttagcgcctcctcggaatgattgcgctcctcaaaacggtattcctcattcactgctccggtttccgtgccgaccacacccgcaccgagcagcgatgcaaaccggatatgcgccagatagcggtgcgtattctttgcaaggcttgccggattcggattggcgagattcaagtagcatccaagcactgccacatccagctgattctctgcaaaaatcttctttaaatacatggcatagcccggcgtcagggcaccgtcatccaccggatactccgaaatcacctttgccagcgccagatgtccgcaggcaaatccctgctcatgtgcaatggcaagccgctcctcaagcggcgcctttttgatatcatgtaaacgtattccaagctgcatttttctatcctttccgggctttcttcctcctgcccgcccaatgttccggccgtcttctaccgctcaacctcatccacgttgtgaagttcgatctcctctccctcgcatccctcaatggagacgttgtccagcacaagcttcttcacgttccgcgcatacaatccctttttgcagcatgcttccacaccgtttgacatgatcggcacgtcgcattttgcctgcccggcgaaagaaacggatacgttgcgcatggtaatctgttcgatcttctgctccggcagaccgtcaaagtaggatgctgccacatggcagtctttcgccgtgatattttcaaagcagaagcgcttcatggacggtgtgccgtcatccaccggatacggttctctcgactgcacaaactcggttcttccgtccgggtcgcagaaatagaaggcattcgcagtaaacggcgtcatgacctgctccatcataagatcccggaagataatattgtccagaatcgcatccttgccgcgtcccctgcgcgtcttgatacgcagaccgcggtcggtatggtaaaaccggcatttctccacgatcagattattgacgccgcccgccatctcactgccgacggtgaccgcgccgtgtccatgctccatcaggcactgatagacgtggatattggaggatggcgtcttgtatcttcttcccatgtagatctttccggatttcactgcgatacagtcatccccgagggagaagcgcacaccgcagatcgtcacatcgcggcaggattccggatcgagaccgtccgtatttggcgactttgccggattctccacgatcagattgcaaaatagcagctcgtcgctgaagtacggatgaatgacccacgccgggctgtcatggaagtaaagtccctgcacacggatgttcctgcagcggtttaaggaaagcattctcggacggaacgcccccaccatcaccttctcatttttccaccagttttcgtggttggcagctccgttgatactgccctccccgtaaagagtcacatccgagacatcgattccggagataattcccgcaaacatcggcagcggatttccctcccaggttccgaggttgtaatcgcccgtctcgtcatagctttcgatcagtcccggcaggatcgcatagtgcgaccggtcagtgtccgccaaaagttctgcacccttcaccagttcgacattgatcccgctttttaagaacaggctggtgatcttataggtgcctgccggaatcaacacgcggctctccggcgggcatgccatgatcgctgcctggataaacgtggtgtcgtccgacacaccgtctcccttggcaccgaatttgcgcacatccagcgtgacaaactcgtaatccgtgcggaatgcaatctctccctgtctggttccgcgggcatcctccacgccgatctcatagtcggtatccggctttaagccgtacagcgacgtgatgacggtatcggtcgtctttacctcatctccgtttacaagaatacggtacacttcttttgtcttatagataccgccgtcatccagttccagcgagacgctcctcgccgttttcatcacaagacgaatttccattgtctcatcctccatttataccttacggtcattcgttacttcttacagtgcaacaaaagggtgacaagcctgccaccctttttctaagctttgtttttgattttagccttttacaccaccggctgaaataccatctacgaacttatcctgtgccataaagaataccacaagagaaggaatgatggagatcagggacagtgccagaattctgttccactggaatccggaatctgcatccatggacatttttacgaaaatagccagcggatattttgccggagtattcacgtaaagcaacggtcccataaagtcattagatgaccacatgaactggaacagtgcgatggaggtgatcgccggggaaagcatcggaacgataaccttcaccagagtctgtactgcgttacatccgtcaatcttagccgcctcatccaattccttcggcacgttgcgcaggaactgaatcagctggaatacgaacagcgtatccgtcgcgaacagggtcggcacaatgatcgggagatataacttggaatctacccagcccatcttggaaaacatgatgaactgcggtacgttcaatactacctgcggcaggaataatgtcgccatcaatacagagaagagaattcctctgcccttgaactcaaaacggccgaatccataagcggtaaccgtcgcagagatcatcgtaaatactaccttcggaattacgtaggagaaggtatttaacattgccttccatacgttgattgctccgccgtagctctccattgcctttttgtaaccctcaagtgtcgggttcttcgggatgaaaccgatgctggagaaaatctccgcattggatttaaaagttgcaccaaccatccagaccagcggatagatcataatcaatccgacaaggatcaggacaaaatatcttaagaatacattgacataatgttttgttttactttctgctgccattcttcttagccctcctcatcagaatagaatacccagtatttctggctcaggaatgcaatcgtggtaaagatcatcaggatgacgaacattacccatgccatcgcacttgccatacccatgtcatactgtttgaacgcactgttgtaaatcaaaagtgaaatcagtgttgtagagtttctcggtccgccctgtgtgatgatgtacggtccgttgaactcctggaatgcctgacagagctgtgttaccaggttgtagaaaataaccggtgtaatgatcggcactgtcacagagaagaactgacgccacttgcctgctccgtcgatcgaagccgcctcgtagagatcctgtggaacaccctttaacgctgcaaggaaaataatcattgcagaaccgaactgccatacacgaagcagacagattacgaacagggaatactttgtatcggacagccagctcgggcctgtaatacccaaaagaccgaggaatccgtttaaaagtccgtcatcgcggaatactgctttccagagtaccgcaatggcaaccgatccacctaagatagaaggtacatagtaagcggtacggaagaaattcacgcccttgatcttgaagttcagtatgtaagcgataaacaatgcaaatatcagttttaacggaactgtgataaatgcatacttgaatgtaaccgtcaacgctgtcgtaatcttcttggttgtgaagacattcacatagttctgaagtgttccgatcacattcatgcccttaaacagattgtagtctgtaaagctgtagaataatgaggaacccatcggccacagtttgaatacaaggaaaccaaacaaccatggcaaaataaagaagaagccgatattttctttgcaaatgtcaacaaacgtttttttcttctttggcactgcaacatttgcggtattacttttcttagccaaccttttgtacctcctgcttatcttaaaatttcattcactcacgacttaaaatcagtctctgcgcataagccatcatggctatgcccatccgttcggaatctttcgaatcaaacggttcttttatcagaccatcgatcatggaaagtccaatttctgcatatttttcactatttaaaacgcccagattgcaagcctttataatagaatatcccatcattgcactttcttttttactgaaatcattattccagccggcggcaagaatatttctgatggtcttcttaaaaatctcttcgagagatttgtaatgttcgaaaatctcacgactcatgctatctatcacgtcgatcaccgccatgagataccatcccttctgttccatatccgcctgctccgacggtgccagtgccagaagctgtctgacgatctgtgcgtactccgccttgttgtgatatctggtctcatactccatatagaatggatacaccgaaaacatcacactgccggatatcttccgggaagaatcttccacacatccgaatacgccgttttcggactgcgggctgttcttaagccactctgcatttctttctatccaggtgcgatactgctcttctcccgtctgatcatacaggaaaaatacgtacctgccaaaccggtgggcatctgccgccgcacgggccgctttctccatcacctcttgcagcttttgcttttccgcttccgcggccaggggataccatgctctgcatccctccaaaaccatgaccgaaagctgctcaacatcatgatcctctgctatatattctgatacaaactgatcaaaatccatcatacaccttttttaaaaatggagctgctgtcgtaagaacagcagctccgaattcatgcagtcagattactgggaaataacggctgttacaccatcatataatgtctgtgctgcttcctctactgtgtaatcgccatagcttaaacctgccattacatcatagtatacaccatcgctgctctttaactgagaatcctcgaacttcggatcaaggctgttggatacccatgcaagaaccttaccgttagcctctactacctggccgtttaataagcctgcatcgttagctgtctttaatgcgatctgagataccggaacacctctctcagagccaaggatctttgctgcttcttcgttgttcatcaagaagttaacaagtaatgcagcctccttcggatgctcgcatgttgcgctgattgcccagcacatggaaacctttgcgtatccaccctgatactcgccaagatctgttaagtaatcaccaacaacgatctcacgtccctcagctgcgcttgcgaatttgcttgcagaagaatcccactcaaagatacctgcatagtgtccgtcgatccagttctggttctgatccagagatgcagcaccgtcaccagcgattgttgctacagaaggaattacatgagcgtcctcaagatcctggatgaactgaagtccctctgcgatctggtctgttgtgtagttgatctgtccgtctgttacccagtcggttccgtatacagactcaagatagtataccatgaggatcattctgtcgtactcacctaaagctaacggatagtaatcatctccgtatgctgcgaacttctcaccgcaagcctttaactcctctaatgtggtcgggatctcgcatccgatctcatcgaatgttgtcttgtcccagtagaaaattctacctgtcatggaaatcgggatacctgcctgggatccgtcagatgctgtacacatatcaagatatgaggaatcgatctggctgaaatcaattacgttagagtaatcattcaggttaaggaaagcggttccatcgttgtcatactgtgtaatccagttccagttgatctggtttacatcctgtgcggttcctgctgcgaatgcggtagccatcttagcttcccatccatcccatgcagcgtatgtaggttctacggtaattcccgggtaagctgcctcaaatgcctcgattgcctttaatgttgcctcgtgtctggtgtcaccaccccaccatgacattgttaatgtacaattctcataagaaccatcatcggtagctgctgcctctgtagctgccgctgcttctgttgccggagtctccggtgttgtggctgctgcgtctgtgtttgtctcctcagatgtggaacttccacaggctgcggtagaaagtgccatggctgctactaaaccggtagccattgtgcgtttcaagaaatcctttttcatagttttcttctcctttttctttattacttggcaatgtgccctttcatcgttttgcactccgaaaggttttagtcacattgcaataatgtaagtgcttacatgttgtattatagcacagccctcataaaaatgcactactttttttcatattttagtttttttttgttagaaatgttttcatgggcaaatatgtgcggaatgtagtctattgtggctgttttccaatgtatgccagaataccgccgtctacatatacaacgtgtccgttgacaaagttggatgcatcggaagccaggaaaacagcggttccctgcagatcctcagctgtgccccatcttgctgcaggagtctttgcaatgatgaactggtcaaacggatgtctggagccgtccggctggatctcacggagcggagcggtctgcggtgttgcaatataacccggtccgataccattgcactgaatgttgtgctcgccgtactcagacgcgatatttcttgtaagcattttcaatccgccctttgcagctgcgtatgcagatacggtctcacggccgagctcactcatcatagagcagatgttgatgatctttccatgacccttcttaatcattcctggaatgactgccttggatacaataaacggcgcgttcaggtcaacatcgatgacctgtctgaactcagaagccttcatctcaagcatcgggatgcgcttgataattcctgcattgttgacaagaatgtcgatcgttccgacttccttctcgatctgtgccaccatggcttccacctgctcctcgtttgtcacgtcgcagacataaccgtgtgccttgatgcccttctcttcataggaagcaagtcccttgtccacaagttcctgcctgatgtcgttgaatacgattgttgcgcctgcctctgcgaatgcagttgcgattgcaaaaccgattccgtaagatgcgcctgttacaagtgcaactttaccctcgagtgaaaaattgtctaaaattcccatttttatgttctccttttctattattcatgtggcatcagccgcagtggccgatagccgcatcgattgcttaactactgcttttcagctacagtgtcacgccctgtttgaagattgccatatcgtggaagcccgcttcctcgctgcagacttttctgccggacgccacgtcgatcacatagtcgaacagctgctgtcccactgtgtctaactccgcgtcttccaccagcacgcccgcattgaagtcgatccagtttttcttctttccggccagcgtactgttgctggaaatcttcacggtcggaaccggggacgcaaacggtgttccgcgccctgtcgtaaacagtacgatatgtgcgccgctcgccgcaagcgccgtcgccgccaccagatcattgcccggtgcagacaggaggtttaatcctgaggtttttacacactctccataggaaagcacgccgcacaccggtgcgcttccggacttctgtgtacagcccagtgatttatcttccagtgtcgagataccacccttcttatttccaggagacggattctcataaatcgtctgatgattgtccttgaaatactgcttgaagtcgttgatcagtgagactgtctcatcgaacagttccctgttggcgcagcggttcatcagaagcgtctccgcgccaaacatttccggcacttcggtaaggatcgtggtgccgccctttccgatcagaagatctgagaatctgcccaccagcggattggccgtaattccggagaatccatcgctgccgccgcacttcattccgacaatcagctttgaggcactgatcggctcgcgctcaaacacggacgcataatcgatgagttcattcaggagttttgctccctcctccatctcgtcctcacattcctgacaaaccaggaattttacgcgattctcatcgtaatcgccgatgtattttttcaattcgccgatattgctgttctcacatcccagtccgagcacgagaacgccgcccgcattcggatgatttaccagatccgccagaatcgttctggtgtgctcctggtcgtctcccatctgggaacatccatacggatgcgggaatgcgatgactttctcaacgcttcccttcactctggcgttggctgccttcgccattgcggttgcaatattgttgacacagccgacagtcgggatgatccagacttcgttgcggacgccaacttttccgttggcgcgggcgaagcccatgaatttgacatcctctgtctttttcacattcgtctccaccggctcataagtgtattccagcagatcgccgagtgccgtctttaaattatgtacatgcacccactgtcctgctgcaatgttctccttcgcattgccgatcctaaaaccgtatttaatcacctcggctccggccgcaatatcgcggattgccatcttgtgtcccgccgggatcgtttccctggcggtaacctccttcgttcccgccagaatggtctccccggctgtcagttccttcaatgccacgataacattatcattttcattgatcttgataaaatccttcatgaatcgtctcctgcctgtttttcacagtgtattatgcaaaaatcttctccattgccttacgcattccaagtgcgcggatctcttctgtataggaagcaactgcatcctccactcctgcaagagcgctcagatcctgtccccagaatgcctcgttggagagaactgcatgtgcatactctctcgcgcccttagaactgttggctgcgaagaactccaataccgcagcgtcgtctaaaatattgtactcctgtccgtcgcggtgtccgatcagcgccttgtcgcggatctctgttcctgtatagaatgccatcagggctgccagcgagaatgtcaggtgtaccggaagctttccttccttctcgatgtaccccaagaagctcggcatacatcttgctctccacttggatacagagttcagggagatggataacagtgcgtgctttacatacgggttgttgaatcttgtgattaccgcctctgcgaaatcgatcagatcctgcttcggaagtgtcagcgtcggaattacttcatcgaaaatggttgctttcatgaagttaaaaatcagttcatcctgcatggactctaatacgatgtcgttgccgcacagataagacgcaagtacgaaggatgtgtgcgctccgtttaaaattctgacctttctctgcttatacggcttctggttgtctgtaaagatcactggaagtcctgcatccggaagcgggaactctttgctgatgtcctttgcactctcgattacccagagtgcaaacggctcgcccgttacgattaagttgtcctgatagccgaactctttacacagctcctccgcctcgtctctcggatatccggtaacgatacggtcaaccagtgtggaggtaaatacacatgcatcattcagccatacggtaaatccttcctccaggttccagagttttgcaagctttaatacgcactcttttaaatgaataccattgtcatcaatgagctctaccggcagcatcacaagacccttgtcagccgcgccgttaaagtgtttgtatctctcatataagaacttggttaattttcccggatagctcttcggcgggttcatctccagacggtcggtatcgtcatacacgattcctgcctctgttgtattagatacgatataacggagtgtatccagttttgcaaatgccgcatacttttcatactcgccatatgcatctaccgcatctgccacactggtcacaatacggttaatgcgcttcggttctccatctacaattccgcgcagctgtacggtatactgacattcctgctcgtggaaacgatccaggcttccgaactcgatcggctttaccaacacgatatcgccattgaatctgccctgctcgttcgctatatcaatcatataatccacaaaagcacgaaggaaatttccctctccaaactgtaatactctgacaggtctttcaacctttcctgttttttctctgcttaataagtccatgatatcctcctggtattctgatatatactgcattttgttactttgtaagcgtttacaccatgtattcttgcaccttttataggattagtcaatatgtaattttgcacaatttagtgatgttatctatattccattacttttttttcattcttttagcatttttgttattttttcctgcttctgttgttgctttctcaatttcaatattgtataataaatgtggttgcaatgaaactgctttcacagctatacttgttttgtaccttatattatgtaactttacatgtaacgctctgggaagcatctcatttcttccatattaaggagtttcaaaaggaatcacaccatgacaatttacgacatttcgaagaaagccggtgtttccattgccaccgtctcccgtgttctaaacggaagcgataaagtccggccagctacccgaaaaaaggtaatggatattatagaaaaatacgactatactccgaatgcatttgcgcgcggcatgggacttcattccgtacagacgatcggtattctctgtgccgattcctcggatctttttctcgccaaggcagtgtattatctcgagcaggagcttcagtccaacggctatgaatcccttttatgctgtaccggttacaatctggacatcaagaagaattacttaaacctcattctttccaagaaagtggatggcattattctcgttggttccaacttcatcggtaccaatgaggaggagaaccagtacatcaaggacgtttccgcacaggttcccattatgctgctcaacgcttcctttgactatccgaatgtgtacagcacactctgcgacgattacacatctatgttcgaggcaaccgtttccatgcttgacgcggggattgaggacattctctatctgtacaattccaattcctacagcggcgtcaaaaagctgggcggttttcgcgccgccatggaggcacactctgtcccggattacgagaaacggattctcttctacgagggagacccgcagcagatggacgacgtcgccaattatctggaacgtctttccaaaaagaagctgagttttcacggcgtgatcgcatcggaggatccgcttgccataggcgccatgaaatacgccagacgtcagggactttgcgtaccggaagatttgtcggtaattggatataataattccatgctcaccacctgctgtacaccggagcttacctccgttgacaaccgtcttgagacacagacgcatcagctggtgcagactctgctcggagttctccagggtgaggaaatgccgaagaaatccattttttccggcaaacttatcaaacgaggcactacattattttaaggttttcaaatataccaagaacaacttatggaggaaaaaaagatgaaaacatttatggacaaagactttttactgcagacagagacagcgaaaaagctgtacaacgattatgcagcagccacaccgattctggattaccactgccacatcaacccgcaggagatttacgaggaccgtcaatttgagaatatcacacaggtatggctcggcggcgaccattataaatggcgtttcatgcgttcctgcggcgtggacgagcgcttcattacaggcgacgcttccgacaaggagaaattcttaaagtgggctgaggtactcggcaaagctatcggcaatccactcttccactggagccatttggagctgcagaaatatttcggctatcacggcgtgctcaacaaaaacaccgctgaggaagtatgggagctctgcaacaagcgtctcgctgagccggatatgactgtccgcaacatcatcaagcagtccaacgtcacactgatctgcaccaccgatgatccgatcgattctctggagtggcacaagaagatcgccgaggatgcttctttcgacgtaaaggttcttcctgcatggcgcccggacaaggcaatgaacattgaaaaaccgacctatccggagtacctggatcagttatccgctgtatccggcatcaaggttgccaccttcgcggatctgtgcaaggcactttccaaccgcatggatttcttcgcttccatgggatgctgtgtctccgaccacgcgttagagtatgtaatgtacgctcctgcttccgcagaagagatcgagagcatcttcgcaaaacgtcttgcaggaaatgatgtcaccaaggaagaagaattaaagttcaagacggcattcatggtcaatgtcggcaaagagtatgcaaagcgcaactgggtaatgcagctgcactacggctgcaagcgcgacaacaacacaccgatgttcaacaagctcggaccggatactggatatgactgtatcaacaactacgctccttcttctgagatggcagatttcttaaatgccttaaatcagagtgacgaacttccgaaaacgatcatctacagcttgaacccgaacgacaaccaggccatcggcacgatcctcggctgcttccaggattccaccgcagttgcaaagattcagcagggttccgcatggtggttcaacgatcacaagacaggcatgcaggatcagatgatctctctcgccaaccttggaaacctttccggattcgtgggaatgctgacagactccagaagcttcttatcctatacccgtcacgattacttccgcagaattctctgcaatctgatcggcaactgggtagagaacggcgagttcccggcagactacgagacacttgaggagatcgtgaagggaatctgctacaacaatgccgtcaactacttcggatttgacttaaagacctgctaattggtttcccattgaaatgcccggttttccgggcatttcatgcaacaatacatagaaaggatattttatcatggaacttagaacagctgcatctccaagagatgtcaaacactacaccaccgaacgtttaagagaggaatttctgattgacgacctgtttttgccggatgtcatcaagcttgtatacagccatattgaccgtatcatcacaggttctgccgttccggtaaaagagaccttaaagctgaccgccggcgacgaactccgcgcacagtatttctgtgagcgccgtgagcttggcgtcatcaatatcggcggcgcaggcaccatcaccatcgatggaaaggcttaccacgttgcacacaaggaaggcatgtatatcggcatgggctcccgcgacattacttttgcaagcgatgacgccgctgcaccggcaaaattctatttaaacagtgctcctgcacaccgcacatgtccaaccgttctcatcaagccggaaggcacaccggaagatggtgttgtcatcgtcaaggactgcaacaaagtagaactcggttccctggagacagcaaaccacagaacgatctgcaaatatatccttcctggtcaggtagagagctgccagctggaaatgggcatgacaaaacttgagccgggaagcgtatggaacacaatgccttgccatacacacgacagacgcatggaggtctatctgtatttcgatatgccagaagatgcccttgtcatgcactacatgggtgagccgacagagacacgccacattgtaatgcgcaacgagcaggcagtcatctccccgagctggtcgatccactccggatgcggcacccaggcttacacctttatctggggcatggtcggtgagaatcaggattttgacgacatggacgacgtagccatgacagatttgttataaaacggaggtctaaaccattatgaaaatcgctttaatcaacgaaaacagccaggcagccaagaatgaaatgatctgcaacacattaaagtccgttgtagagccgatgggtcacaccgtattcaattacggtatgtactctgccgaggatgagcatccgctcacctatgtccagaacggtattcttgccgctgtattattgaattccggtgcagccgatttcgtcatcacaggatgcggtaccggcgagggtgctatgcttgcctgcaattccttcccgcaggtactctgcggacatgtagagtctcctctggacgcttatctcttctcgcaggtcaacgacggcaactgtatcgctctcccgttcgctgagaacttcggctggggcggtgagttaaacctcacatacatcttcgagaaattattctgtgcaccgggcggtggcggttatccgaaggagcgtgtcgtaccggagcagcgcaacaagaaaatcctcgatgaggtaaaaaaagtcacacaccgcgatctcgtctccatcttaaaagagcttgaccgtgatctcgtcgtcggtgcattgagcggcgaacattttgccgaatatttctatgccaactgcaaggacgacgccattgctgcatgcgtaaaggaattgctcgcataagccgttccaactaagtaattgccgcaataagcatggatctctttggagtgataagtaatattatatgaaacacacttggagatttcatgtggaaatggagatggaaattcggttcaaaaaatgtggaatttctaaccaaccgaatgtttgcatcttcgatgatccgtgtctttccaagtttggagcactccacggactgtgtccgcaagccagcagacaattttaggacttttgtgtgtgtcccttgcggcaccagacaacagatggcataaatgccatctgttgtcgaataaaacataaccgcgcgaagccgatgtttgagtcggcatctgccatattttcaatagcagatgccggcgagtttcggttcgcgcggttttatattgtctatgaagaggtgccattagggacaccagaaagtccgctcattgtctgcggcttgtcggacacactccgtgagtgtccaaacgtggaagagacacggaattcgatgcaaacatctcctttagcatggcagtgcgcttttccatctctcccggtcttgtctgattaaaatcatacagacgctccagacacgccgtctgctcccacaccagttcctcatctgacagcagataaagctctatattgtgcatcttctctcttaccagccattgccttccctctcctttgtgttcctgtccatctcccctctcctctgccgtgtgctctcagtcatcacagcagaacagatagtaaccggcgatcatgcataataccagaagaaggaacccaaagaaacggctgtggagcacaagcatcaccagcatccccatggaaaagcaaaacagtgcaaatcccatcatccgcttcataagatcccccaaacaatctgtctcttcatcatatgcatctgccggaagtttctctactgttttttagttttcttctttgttcacggaatcctttaagatgtcctccatctctttgccagccgcttctctcgccttcgtctcatcctcgtctgcagcggacgctgtatcggatgtgacctgattcctggaggtaaatttgttcacaaaatccggcaccatatccagaatctttgtgacgccgtcctggttcttgatgttcacgagcttcgtagtaccgttctggatcaccagcacagcgctcggcataatcttgccgcccataccgcctgctccattgttcttcttatcctgtgaaaatgctcctgcggcaacgccgaatgatacatccacgagcggaagaatgatggtatccccgatatgaatcgcatcgcccaccaccgtcttcgtcgtaataaaactgtccattcccttaaacagggattctactgttgtgtgaaaactgttatctgccataatgttacccctttcttatcctttatctgtgcatcagccatttcagccagatgcggaactcctttttgccaagcagccggactgccgatactgcgatatgcagtcctcttgcacgcccttttatatcaaatgtgcctgttacataggtattctccgcttcaaagtccggatatacctgcacctgataccgatacagaaacggaagcacacataagcccccgagcacctgcccggtcagcgccggatcccccatggaaaatgtcagatccgtccggatcctccggaatttaaaatgggtcagcaggtattttaattctgtaaaaatgagcggcagcacctctctgtgccgctcgtccgtcaaaaacgtacggacatcttttattttcttaagagcctcttttatgccggcacgaaactgccgcagttttctgacgagtcctgcaaagaatgcacggatacgctcccatatccgccgaaacagcccgccgcgctgctttctgcgcacagccggattcgcttgttccagttccttatgctccgcaggatccggcttcttcgccccggcgcagactttcttcgcctgcctctcgtcgaaccgttccgcctctccctgctcactgtctgccaggatgctgcctgttttctgctccccgtctgtcagggggacatctgccgcactgcgctcttcgggttcttctgcaccgtcctcccggtcatcctccccgggttctccatcgtccggcttttttcctttccgggtgatcccaaagatccacagctgtgaagaaaacccttcctcttcgtacgctgccctccagcttaccgcatgcaaaagccatgtcacagcaatccggacggtcgtcttctccccgatgctgccgctcacctgataccgcaccggaacaaaaagcaccactgccaaaatgagcaggatcagtccaagcaggatcagcaggatgattccaattatttttaatatcagcaatagaactgccattatccctccctgccgctccggtgctcatccagataactgcgcacaaaaaacgctcctgtgttccggtatacttcatccacaatcgacaccgccacttccagcgcctcatcataactcccggcaagtccggcaatcttaaggtctttcttcggataccctttctgcaaaagttcggcagccgggataatatccagaagatttttgtcattcgacgcaggcgcgatcacataaatgccgatctgtcccgcattgtggtcgattttccacttcacgcgctttgtcttatgtacaatactttcccctacatataactcgtcataccatgtcatgcatgctctccatatcacactgctctaaaagtatttgtgatttccccacaaattactcttcttaagctccagatattcattgtaagctttctccagaatctgtttttcgttcggaaacttcaagagatgatacgcttcgtgatacttataatatccggaatcaacaaaatattcttcccgctgcggcttgctgtaataactgtctgccatcataagataccagtggacgtccttctccaccgtgtcctccggtaccgtaaaggaatactggctcttgccgacatatttgataattgccgccttcaccccggtctcctccaacacctcacgcgttgccgtatccggatactcctccccggcttccaccgtccccttgggcagaacccagccttcatacttgttcttataattcttgtataaaagcaatatcttaccacggaatattaccacaccgccacagcttgttgcctctatcattgcaatacctcccgatgtggtcttttcataattatatccagtataatactttttcagacttcacgcaacctcgtatgcgcttagttctcccatgtataatacgcatcaaagatctgttttgcaatcgggaccgcatactcgcttcccacgccggaattctccacgatcaccgccaccgcgatgtccggttcctccccgttatgcgcatatcccacaaaccaggaatgtgtggcgtccgagctggatgagaactccgccgaacccgtctttccggctgcctcatagctgtcgctctttaacttggtcgctgttccttcctccacaacatagcgcatatattcctgcaaaacggaagcatcgctctccgagagcagtgttttgtactccgcaggctcatactgctccacaacctcgccctccgcatccgtgatgcggtcaatcacatacggcttcatcagcacaccgtcgttggcgatcgcagaagcgattaacgccatgtgaaacggtgtcacaagcgtcttaccctgtccgatggacgtctccatcaccgctgaatcgctgtctcccggctccagcacaaagctgctcttcgacgactcgaaatccgtcggaagcgcggtattaaacagcatctggtcacagagatcatcaaactgttccagatccagtgtgagtcctaaggacgcataggaggaattacacgaatttgcgaaggaggtctttaaatcctccgatccgtgccgcttattgttatggcagtggatggtctttgtgcccacggtatactcgccgctgcagtcaaaatgatagtccgcatagtccgcattctcatgaatgtactcgagcgtggtaaagatcttaaacgtcgatcccggcggatacagcccctgggtggcacggtttagaagaaccgagctgtcactgtcgtctgacacaaaggtatcccagtcatccgcgatcgtgttcggatcgaaatccggctttgacaccatggcaaggatcctgcctgtctccggctccatcacaacgaccgccccgtcatagcttcccagtgcatcgtacgcctgaagctgcagatcataattcaacgtcgttgtgacactgtcccccggatttttctctcccttgatctcactgaccgccttctccatatacagaatgttggagcgcagcagattgaaattcgccatcgcctcaatgccggaagtaccgtgtgtggaatatccgacaacatgcgcaaagatcctgcccgccggatactttctcgtctcatttccctctgcatccgtaaccgtctccgccagtgtgactccgtcggcggaatagatactgccgcgcacgacgctgcgcgtaaagagctcctgccgtttgttgtacggattattgataaactgttcgctctccacctgctcaaaatacacaaaatagcccatcaggcacagaaacaaccccagaaaagagtaggttactaccgcaaattcccggttttttgtattcttttttttctttccgtttttatgaaaaagtttccacatcttcgtcaaatcctgtttttcttcgtcttggcggtgctgcattttttctttcatttgctgccccctcatcctgccgtctgatgtataagccctgcacaacggcaaacatgatcatcgttgaaaatagcgagcttcctccgtagctgacaagcggaagcgtgactcctgtcgacggaataaattttgtgactcccccgacggtgaggaacacctgaaatccgtatacggttcccagtcccagcgcaatcagcttgtaaaactgctccttcatctgcatcgccacgttaaaaaacatcaaaaagcagctgatgcacaccatcaaaagacagattgcaaaaatgccgcccatctcctccgcaatggcggaaaagataaagtcctgctcgaccaccggaatcttttccggcatcccctggtatagtcccattccaaaccagccgccggtaccgatggcgaacagggactggcagatctggtagccctcattctcaattcttgagagcggatcttgccatgccaggacacgcacgcgcacgtgggaaaacagctgatatgccaccaccgcggcaatacatccggtcagaagtcctcccgcaaaatagaacagctttctggtcgccacatagagcatcaccaggtaggtcacaaagaagatcagtgctcctcccagatctctcgataacaccagaatcaggacatgcaccgctgccagcaccgtcgcgatgcacacgtgcttcaaatccgtattctcgtaaagcatacatgccacaaaaaatacaaatatgatcttgacaaattcactcggctgaaccgatattccggcaagcgagattgatattttcgcaccgctgctcgtgattccgaacgccagaaccgccagaagaccgatgatcccggcagctgcgtaaagccacggcattttccgcaaaaagcgcactttctgaatcagcaccggtataatgagcgaacacaccatcgcccccaccgcaatggcaaactgccggatcgccttgtcaaaggaaagccttgtaatcataataaacccgatcattaacagcatgcacatattgttgatcaaaagcccggaagcccttccgtacaccaggcggtaactggaaattgtgacggcaataaacgccgcctgcaccacatagaacaaaatcatgcggatatcgtccgtcaccgcgtagattgccagaaacgcatccagatgaatgagatacatcaggcacatctgacgcttaaatatcttcgcccttttctccggggtaagcttcccgcggaatgaggaaaaacactcgtacgtatagaacgcgaacaaaagtgtcatgagatattttgataattctacaatcaaatctgtcattggttattcgacccctcgtttataatgtcccctcgtgtagccgtcgggaaacagttcctttacgctgtgttttccggaaaggaacgtccgctcaaaaagatccagtatgaaagctgcctgctcttcctcctcaatcgtaaacgatatccggtatgcggcaattcccatgcgtaaaaaatccgcgcgttcgtcaaaaagcatgagcggcgtggtattatagatcgtattataacactccgtgcagttatttttgaccgggaaatattttccataccgatccttcagatataagattccgcgctccctatcacacttctccgtgttcgcatgcacgcactgcgcggatgtcatcagtggaagataaccgtacaccatcgcctcgctgtgatgattgtctctcgcaaacagttcgctccggttgagttcaagcggtacggtatcgcgctctggtgcaagctgcaaaaacacatcccgcgctgcactgttccagctatagagactgtgatctaaaattaacggcgtctccgcacccagctcctgccgcacaaatgcggcggcatcgtaactttttgccacaaatccgtccagcggcaatgcctttaagtgctctatattctccctgtaaaatgctgccgttctgctgcgaaataccgccggcagaatatagtagaatttctttcccgccaggtgtgcctctcctgcatcttttaaaagtgccatccataattcatccctggtatagcagctgctgtccgcataaatctcatgtacaaaggaagaacgaagcaccaccgacagcagacaccggttctccaacgaaacgatgaccgttttaccggcatcctctgcttctcttcgctcctcctgccgcgtccttttgtccgcgccacagcctaacttctccgcctccggggacgctgccccatccctgcggtatccctgcagaagcttctcctccagtgcaagaagtgcctccctacgcagcgcgtttagtgcctgcaccggcagaaaaacatcctcgtccatctcaatggccagctgttcaaatgcaaacggtgtatttcctgtttttctcatacagacgtccaccctgtcacgcgagagcggctgtttctgcgcctgcaatacctgctccccctcacacgtaatctcacatccttcacattgcagtttcagtgtagcagataaatctttttttaatcttaagaatccattgattttttctttgatttcctgctccggccgcactttgatatagtgttcccgcaccgtcttctgcagtgcctcgtctgtcttcgcatgtcccggggaatcaaaggtaatcatctccctgccatttctgcggaaatagtacccgtcggtaaaaccgctgcggttgccgagcgccagcagctttctgtgatcctcctccgttaccgcgtaagccttcttcgcccgccggcgtgcctcatcctcgctgcagccgcccgctctctcctcattcagccggtccagataacggtccatatactgccggtaaacggatacaacgcctgccgcatactccgcctgcttcatccgtccctcaatcttaaaggagaatatgccgctctctgcaagtgcgggaatggcatcaatcgtacacagatccttcgggcttaacacgtaattgccgcacgcgatacgggatttctgatcctttttgtagacctcatagggaagccggcacggctgtgcacagcgcccacggttgccgcttctgccgcccagcatactgctgagcagacattgcccggaataacagtaacacagtgcaccgtgcacaaaactctcgatctcgattcccaccttgtcatggatttctcttatctcggcaaacgacatctcccgcgccatgaccacccggctcgcaccgagctgcttcatgtacgccgcacccgccgcgccggtcacagtcatctgcgtgctggtgtgaatatccatcctagggaacatgcttcgtatccttgcaaacgcccccatatcctgcacgatcaccgcatcgagcccctgctcgtaatacggcagcagatactcatagagtccctgttccagttcctcctccttgaacagggtgttcaccgtcagatacacctgtctgccatggatatgtgcatagtcgatggcacgcagcaattcttcctcattaaaattattcgcatatgcgcgggctccaaaatggctgccgcccagatataccgcgtccgcccccgcccgtatgaccgcctcaaacgtctcgtatgatcccgccggagccagcagctccaattctcttttctgcatcatttttcttacctgttatatgaaaataagggacgaaagcaaatctcttacgtccccgtattgtctattcttctgttttatctttttccgttactttgccgagcagcgcatcctcgagactcgcctccagcttagccttgttgattaaaagctccttgttctgctcctcgagctcttttctggctttctcgtcgctctctgccttgatctgattggaaataagatcatgtttgagatcgtagatttccttttccttctgctcgatctcacgctcaagcttctccacctgtgttttcgccttaaaataatcatccgcgatattcaactgcaacagcgtcgccttcatgtcgccggatagatgtcttaactcttccatgccctgaaactcgcccagcttattgttgatataggtggcaaccttctgtaggtactcctcgccctcataaccgctcagtgtgtatacctttccaccgatgatcacttcggcgcttgtcttctctgccataccatttcctccaaactcgggtatccgctacaatatatagtatattatactgacatatttaaggaaaagcaactatttctatacggaatgttcgattcccagatgctggtatgccagctctgtcaccacccgtcccttcggcgtgcggttgatcagcccgttctttaccagatacggttcatatacgtcctcgatggttccggcatcctcaccgatcgctgccgccagcgtgtccagcccgaccggtccgcccgcaaattttccgatcatcgtcatcaaaatgttcctgtcattctgatcgagccccatcttgtcaacctccagcagatccagtgcaaaggacgctacctcctttgaaatccggccgtcgtattttacctgcgcgaaatcgcgcacgcgctttaacagccggttcgccagacgcggggttccgcgcgagcgtctcgccatctcgtaagcaccttcctcatcgatctccaccccaagtgtcaatgccgaatgcaggatgatcgtttttaactcctccaccgtgtagaactccagatgatgcaccacgccaaaacggtctcttaacggtgccgacaaaagtcccgcgcgcgtggtcgctcccaccagggtaaacttcggcagatccagacggatggagcgcgctgtggctcccttgccaagcatgatatcaatggcataatcctccattgccgggtacagcacctcctccacctggcggttcagccggtggatctcgtcgacaaagaggacatctccctcctgcagattgctcaggatcgctgccatttcccccggttttccgatggcaggtcccgaagtgaccttcatatgtgttcccatctcattggcaatgattccggcgagcgtggtctttccaagtccgggcggtccgtagaacagcacatggtcgagagattcccccctcgcctttgccgcctcgatatatatttttaaattttcctttgccttctgctgtccgatataatcgtccagcgtctgcggccggagacttttctcgatcttaagatcttcctcctgcacctgcgtggatatgacccgcttctccatgtcccagctttcctttcttccgccttgccgctttccttactacaggaatgccatattcttaagcgcggcttttaacagtgtttccacatccatatcatccgtgatctcaatgccgtttaacgcctttaacgcttccgaagaggcatagccgagcgccacaagcgcctgcaccgcctcattcttcacaccgctgcttccgttctcgttctgtctgctcacatgctcggatttgagttcaaacgcctcctcaagcgacagcttgtccttcagttctaaaatcacacgctgtgccgtctttgcaccgattccgggcgctttggcgatcgccttcgcgtcatcgccaagcaccgcaaatcgcagatcatcggttgtcatcacagacagcaccgccagcgcccccttcgggccgataccgttgacgccgattaacagcttgaagacacgcagatcatccttcgtcaaaaacccgtacagaatcatcgcatcttcgcgcacattcagatacgtatagagcttgacttcctctcccacagccggaagatagtcaaacgtctgcccggtcgtatagatccggtatccgattccgcctgcctccacaaccacgctctcttcttccacatccgcaaggacgccttttatatatgcgtacacacgtatttcctccttatcgtttcagccgtccgccaatccttagtatgatctcctgggctgccacaccgatcagcagtcccgtaacgatgcctgccacgaaaagcaccggcagatagtaaaaaatgttgatattctccaccacaaacgccgccacggcaatctgaccaatgttgtgtgacattccgcccgcgacgctgaccggcagcacaccgagctttccggtccgtttcaaaagatacatcaccagaaagctgaacattccgccggcaaggctgtataagatactgaacagattgccgaacagaaaacccgccagtacaatccggagcatcgagatggcaaacgcctccttagtgccgacacagtacagcatcagtaccaccacaatattggtgagccccagctttacccccggtattccgaaataaaacgggatcagggattccacataactgcagattaaggcaagcgcaagaaaaaccccgagatacgccaccttatctcgcaatggagtcgaatccgttttcttcacttcccgtcacctccacaaccactttgttcggcaaacagacaatcatctcatgattcttagagattgccttctgatggacacacagcttgtccgggcagtccgcctccgtcatgtccgccctgccatcgcggattgtcaggacattcgttgtcacgccgtcctgcacaatcggtatctcctgctcctccccgagcgcatagatcccgtacacactgccgtccacggtgacgcgcacacaggcacccgcatccgcgcgcgttcccgtccgctcatagaccacaagaaataccgtaaccacggcaagcagtattgcaagaaaaatcacatcgtttctgctgattcgctttttcataccgtctgaccttttccgtctgcccgctcgccaaggtaataaaagccccggcactcggtcagctttacatccagaatctttccgatcatgtccgctgtccccggcagatgtaccaccgagttattgctgagtcttcccgtcacaagcgaagcatcctgctcgttttgctcctcaatcagcaccggcagcgtctgtccggtcagcgcccccgctttttctgcggagatcttctgcacttccttaagcaggcggtcaaaacgcgccttgatcacatcctccggcacctgctcttccatggatgccgccggtgtcccggtacgtttggaatagataaacgtgaacgcgctgtcataacgcacttttcgcaccacgtccatcgtctcctcgaagtcctcctccgtctcccccgggaatcccacgataatatccgtcgtcagcgcaatgtccggcactgccgcgcggatcttgtccaccagctccagataatgttccttatcatatctgcggttcatgatctttaagatccggctgctcccggactgtaacggcaggtgcagatgtttgcagatctttttggatcgtcccatcatctcgatcagctcgtccgagagatccttcgggtgggaggtcataaaacggatacgctctaacccctcaatcttctccacttcctctaaaagctgcgcaaacgtcaccggctccttcagattcttgccgtaggaattgacattctgtccgagcagcatgacctcgacaacgccgtccgccacgagctgttcgatctcacggatgatctctttcggctccctgctgcgctcccttccgcgcacatacggtacgatacagtagctgcagaaattattgcatccgaacatgatattgacgccggatttaaacgaatacttccgctctaccgggaggtcctccacgatctggtccgtgtccttccagatatcaatcgtcatggaatccgattccatcgccgtcacaatcagctctgcaaatttgtagatattatgtgttccgaagatcagatccacaaagcggtagctttcttttaatttttcaacaactaccgtctcctgcatcatgcagccgcagagtccgatcagcatatgtggatttttctttttataattctggagtatcccgagtcttccatagactttgttatttgcattttcacgcaccgtgcaggtattgtaaataacaaaatccgcgtcctccgtatccgtctccacataaccgatgcgctctaagataccgacaagtttctcggaatcgcgcgcgttcatctggcagccgaacgttgtgacatgaaaggtcagcggactgcctttttttgcagcgagctgttccacataatttttagcaatgtccatgaagtaatactgacgctccggctcactctgcgggatctgctttttatcgattatttcaatgtctattttctttttcatcttcatccttaccatctacggacgtgtctgcccgtttccatatataatatattttgtgctggtcagcgcatccagtcccatcggtcctcttgcatgaagcttctgggtactgatgccgatctccgcgccaaatccaaattcaaatccgtctgaaaaacgcgtcgatgcgttgacatagacgcaggcagcatcgatctcatccaggaaccgctgcgcgttcgtgtagttttctgtgatgattgcctccgaatgcccggtattgtagcggttgatgtgtgcgatcgcctcgtcgagggacgacaccgtcttcacagagatcatataatcgagatactccctgccccagtcttcctccgtcgccgccgacaacagttcctttttcaggtctccgccatttgccgcctcccggcgctctgccgctgcaagacttttctcatccgcatgaatggaaacatccttctgctgcagtgccgccgcaagctttggcataaatgcatccacgattttctcatggatcacgagtgattcacaggcattgcacacaccgatccgctgggtctttgcgtttaaaataatacggattgccatatcgaaatccgcactctcatccacatagatatgacagttgccggttcccgtctcaatcacaggaatcgtcgcctgattgacgacggcgcggatcagccctgctcctccgcgcggaatcagcacatccacatattcgttcatcttcatgaacgcagccgccgtctcccggcttgtatcttcaatcagcgatactgccgcacgcggaatgccatgtgcctccaaaacttcctgcagaaccgaaacaatgacgatattggacaaaatggcgtcactgccgccttttaagatcactgcgttgcccgtcttaaaacacagcgcaaacgcatccaccgtcacattcggtctcgcctcatagatcatgccgaccacaccgagcgggacgcgctttttaccgatcataagaccgttcgggcgcttcttcatggaaaggacttcgccgatcggatcggcaagatctgcaaccttccgcagcccctctgccatctgctccatccgggatggggtgagcatcagacggtccagcagtccctcgggcatatgattctctctgccgcgggcgagatccttctcattctcgcggataatctcatcggtatgtgccacaagtgcctctgccgctgcacgcagcacctcgttcttcgtattcgtgtccagattgccgatctgtctgctcacttcttttgcgctcttacaaagttctgtcagttccatatcctttccatcctttctgtcagatccgatattcccgctcctccgtataaatccgatgcatccgcacgtcggtgggaagcaccgcaagctgttcctcgatctgcccttcaaacgctaccgccatgcgggacagcttcggaaaccttgcaaaatagcggtcataataaccgccgccatacccgtaccggttccccttacggtcaaagaccagtccgggcaccagcaccaccgcatcctcttccccgatccgtttgcagctctcatccggctccatcacatgaaatgcgccctcccgcaccctggaaagctctctgatccggtaaaactccatccggtgtgtgtcctgcattctcttcacctggccgcagtcccgctgcagccgctcttttgatgtaaccggaagcgccaccgtcttgccgtccgaaagtgcctgtgccagaaacggcagacagtcagcctccgcgccgagcggataatagccgtagatgacagcgctgttatgataccagtcagacgccgccagcctctcacagatctttctgtttttttcctgcacttcctcctgcggcagttccatccgccatgctttgtgccgcgcccttatctgctgacgcgccttctcctgtgtcagcgctgcgtcaggaaagtcctgtcttttttccatacttatctccaaggttctccacggaaccgtccggattcaccatatcgatattgttaagctgcgccgccagatttttcttcacatccgcaacatactgcttgcgcagcagcgcctgctcctttttttcttcctccgtcagcccttccgccttcgacttgcggtataacgcattgattctgtcaatctgttcctggttcatagtgctccttttcctgtattcttaaccgatcgtctccaaaataaaatcttcaatccggaaagattctttcttctttgcctgaaaaatggttcccttaaaggaatcatcaaatatatgatgcagaatgcagacatccctgccgttcgcaataatcatgtctgttcccgagagcgttgcaatctttgcggctgtcagtttggtcgccatgccgccggttccaacatcactgccggtcgaacttttcgccatgccgtagatcgacgcatccatctcctccaccacttcaatgagctttgcatccggattcttgtgcggatcgtcggtaaaaagcccatcgatatccgagagcaggatcaaaagatccgccccgatcagagaagccacgattgccgagagcgtgtcgttgtcgccaaactgcatctcataagtagaaaccgtatcattttcattcacaatcgggattgcgccaagacggaacaattcgtcgaacgtattcttcgcattctctctcgagacagggttcaccatcgtgttcttcgtcatcagcacctgccctgccacctgattgtattccgcaaaaagccgctgatagatcatcatcagccgcgcctggccgaccgccgcgcatgcctgctttgtcgaaatgtccttcggccgctcatccatgccgagcgtctgtctgcccacggcaatcgcgccggagcttaccagacacacatccatcccgcggttccgcagattgcagagttctcttaccagatgctccagcttggtaaaattcagattgcctgtctccccgtaattcaatgaggaagatccgatcttgactacaactctctttttctcattaaaatgaaaatgcttttgttccatctgtctaacgtcccctttatatgtaacattttccaatcattcatcccaaatgggcatagagtctcatactgtattactctatcatatcttcatcaaaatggcaaattgatgttttcacattgtatgaacagaaagtttatggtacattggatgggaaacatcagaaatggagatttttatgatgagaaaaaagaaggtactctcctgtcttctggttcccctgctctctgcaaatctgctgctctccggctgcagccgcacggcggacgaaccggttaccaagtcaggattttattttaacaccgtcatctcggtctcgatctatgaaaaagggagcgaggaactgctcgatgactgttttgcccttgcgcaaaagtacgagggatatttttccaatacgattccggacagcgatatttccaaaatcaacgatgcgggcggcgctcccgtgacagtacacgacgagacgatcgaacttcttaaaaccggcatctcatatggcgacttaagcggcggcaaattcgacatcaccatcggtcggctttccgatctgtgggacatctcaaccaaagcgctgcttgatcagaccgatgtctccatgatcccctccgacacggacattcaggcggctcttgccacagtggattaccgggagattcagattgacggcaacacagtgactctgcaaaatcccgatgccaggattgatctgggcggcatcgccaaaggctatatcgcggatcagatgaaagcctacctgaaccagaagggaattacttccggttacatcaatctcggcggaaatgtgcttgcgctcggcgcgaagacggacggttcggcatacaccatcggcatacagcgtccgtttggtgaggaaaacgaagcgattgcctccgtctccatcaccgatcagaccgtcgtatcctccggcgtctacgaacgctattttgaagtagatgggacgcgttatcaccatatcctggacaccgcgaccggttacccttacgataacgggctccttgaggtcacgatcatcaccggtgcatcggtggacggcgacggtctctccaccacctgtttctccctcgggctggaagacggtatggcgctcgttgaaagccttgatgctacggaagctattttcatcacagacgactatgaagtacacaccagctccggcatgggaaccgtcattccctatgagattctggaagattaaacaacaaaacaggcgtgaagaattcgtacttattaccgcgaattcttcacgcctgtttttatttcacactttcattccaagaaacgattcttacaggatgattttcggagaaaatcattcttacagaataattttctttggacacttctgtgcacagataccgcatccgacacacttctcctgatcaatgtatgccacgttgtcaatgacatgaactgcatccttcgggcagttcttctcacacagatgacatccgatacatcctacggaacatgccttcatgacatccttgcccttatccttggagctgcactgtacaatgtgctttgccttgtaaggaacaagctcgatcagatgcttcggacatgcagcaacacattttccacatgccttacatacttccttgtcaacctgcgcaatgccgtccacgatatgaatcgcatcaaacggacaagcctttacacagctaccgtatccaaggcatccgtaattacaggacttcggtccgccgttcggcacgaatgccatggctgcacagtcctcgttgccggtatactcgtaatcgcgtcctgccttctcacaggttcccgcacactttacaaatgctaccttgcgctcgccttcctcggctgccacacccatgatctcaccgatcttggctgcaaccggcgcgccgccgaccggacactgattgaccggagcctcgccctttgcgattgctgctgccagaccggaacaaccggcataaccacagccaccacagttatttcccggaagcacacctaagattgcttcctctttttcatctacctctaccttgaacttttctccggaaataccaaggaaaaatccaatcaagatacctacgccgcccacgattaaggctgcaaataaaattgctgtaacgttcatcttctttttcctcctaaatcattcctgagaatcccatgaatgcgattgacatcagacatgcggaaatcaatacgattgcagtaccctgaaacggcttcgggatatcattgtactcgatcttctcacgcacacctgccattaaaacgatcgcaatcaggaaaccaaatgcggttgcaaaaccgtttaccacgctctccaaaataccgtattccttggtaacattcgtcagtgcaacaccgagaacggcacagtttgtcgtaatcagcggaaggtatacaccaaggctctggtataatgccggcatggacttcttcaagaacatctcaacgaactgtaccagtgcagcaattacaagaataaatacaatcgtctgcaggtaggtaaggtcaatgcccttgctcatcagatagctgttggcaaggatatatttgtagatcagcgctgtcacgaacgaagagatcgtgataacgaatacaactgcgccacccattccggcagcggtctctgttttcttggaaacgcctaaaaacggacagataccaaggaactgacttaatacaacgttattgacaatggcagagccgattgcaattaaaagtaatgttttcatccgtatctatcctcctattctgctttttctgccggagcttccgctgccggtttcttaccggtgcatgcagcagacatactgcatcctgcacagtctccggtgatacatccggacggctcggcaagcggcttgcccttggctgccatcttctcacggacgatcttcatcacagctaccagacatgccagtacgaggaatgctcccggtgccataacaaagatggtgatcggtgtgaaccagcttaaggacagaatctggaaaccaaagatctgacctgcgcccagaagctcacggaacagtccgatcagggtaagacccatcgtaaatccaagtcccataccaagcccatcgaaaagagacggaactaccggattcttggaagcatagctctcagcacggccgagaataatacagtttacaacgattaacgggatatacacacccagcgactcggagaggctcggggtatacgcctgcatgataaactgcaccactgttaccagcgatgcaacgataacaatgtatgccggcatacgcacgccgtccggaatcaccttacggaatgcggaaatcagcatattggaaagtaccagtaccactgttgtggaaagtcccataccaagtccgttgattgcggaggatgtgacagcaagtgtcggacacataccaagcatcagaacgaaagtaggattttccttaatgagtccattatataaacgttctacattcttgttcattgattagttacctccttctaatacgctgtggaagtatgtaaggcaggcattcacaccgttcgccatcgccttggaagtaatggtggaaccggaaattgcctcgatctcattgtccgcagacggtgtcgacttcacaaccgtaaaggagtctacgttcttgccctcaaactggctgtagaacggctcttcctgggctttcataccaagtcccggtgtctcggaaatacttgtgatggaataaccgttgaccgtaccgtcattctggatgccgacagagaatgtaatgctgccctggcttccgtccttcgccgttacggtaagcacatagccgagcggattgccggaagcgtcaagtgctgtgttgacagcctcgatatcgtcagaatatccattctgcgccataagatcttccgctgcagcggtgtcgaaatcagcgtactcctcaaaggaatccgcatcctcaaatacctgcttgtaagcggactgtgtcttctcataatttacctggtcgatcgggcctttggtaatgccgtagaccacgccgaggatcagacctaatacaacagtaaaagcaaataaaaccaatgcgtcatgtacaatcttcttgttcatttctatttgcctccttcctgcttcttcgcttccttcacctgaccgaatgccatcggcaccgtgtgcttctcaataagcggcacaaggatattgcttaagatgatggcgaaggaaacaccctctgcattcgcgccgaagcagcggaacaatccggtcaggataccgcagcagataccaaagatgatctgccccatcggtgtaatcggggatgtcacataatccgttgccatgaagaatgcgccgagcatcagaccgccgccgcaaagctgtgcggtaagatagctgccgtcaaatccatgaccgccgaataaaagcatgaatacagcaaatgtaataatgtaagatgccgggatgcgaaggttgatcacacccatcagaatcaggaaaatagctccgatcaggatagcgatcgcagatgtctcaccaatggtacctgcggtgcgtccgatcagcatatccatcgtattgaccgcctcaccgttacgcatggcagcaagcggtgttacgctggaatacacttcaataccgttctttgtgatgccgaactttgtcatatcagcagcaaatgcaatcaaaaggaagcatcttgcgcccagcgccgggttcatgaaattctgtcccagtccgccaaacagacattttacaaccacgattgcaaacacaccgccgattaccgcctcccaccacggaagggttgccggaaggttcaatgccagaagcagtcccgttacaacggcgctcaggtcatcgatcgtctgctttttatgtacaatcttattaaatacccactctgatgccacacagcttgcgatcgttaccagaatcagaaccaatgccttatatccgaaattgtaaataccgaacaggcttgtcggaagcaatgcaataatcacatacagcataatacggcttgtggtatctttggcacgaacgtgtggtgatgatgaaacatgatataaatcactcacgataatccacctctctcttcttgttttttgaattattttttgcgttttgcagcaagtacctgctttttcatcgtcttaatggactgtgcgagctgtctgcgtgcagggcatacaaaactgcagcttccgcactccacgcactcgagtccgtgccaggattcaaacgcctcagccagaccgttattggaaaacttggcaagtcttgacggaatcagctgctccgggcatgcttccacacagcggccgcagttgatacatgcggacggctccaccttggacacttcgtccttgcttaagcaaagcagtgaggaagatgtctttgtcgtaggaatatccaggctaaacatcgcaaatcccatcatcggaccaccggaaataatcttctccggctgtgtcttaaatccgccggcagcctccaccagttctgcatagctggtaccgatgctgtataagaagttgcccgggttggcaatggcatcgcctgtaatcgtagaaatacgattggttaccggtctgccaagctttaccgcacggtaaacagcaatgatggtctccacattatccacgatacatcctgcatctgccggaagcatcttggaattgatggcgcggcctgtcactgcataaatgagctgacgctcaccaccctgcgggtacttggtctgtaaaggacagacctcaattctcggttcatccttgacaagctctgtcagcttttcaatacaatccggcttgttgtcctcgatgccgagaacacccttcgcatgatcgaacagctggagaatgatcttcattccaccgatcagctcttccggattttcgagcattctgcggtagtccgccgtcagatacggctcacactctgcgcagtttgcaattacatattcaatcttttccggctccttcggagacagcttcacatgtgtcgggaaacctgcaccgcccatgccgacaacgcctgcctcttttaccttattgacaatctcctccttggagagagccgtcacgtcttcacacggcgtgtactccacctcttcaaacgctccgtcgttctcaatgacgatggaattcaccatgtcaccgactgccacacggtgcggttcgattgcctttacggtaccggatgccgacgcatagatcggggatgacacaaagccacctgcctctgcgatcttctgtcctttcagcaccttgtcaccaaccgctaccaccggagtcgccggtgcaccgatatgctgtgacaacgggtataccagatcacccttaggtagaacttctacgatcggctgatcctttgccagttcctttccttcataaggatggacgccgcctttaaatgtcttagaacccatttctcgtgccccactttctcttatctatattatattctatgccaaaagtcatagaataccctcttgtagattatagcacaatcactcggaaattgtagcaatttattgtattttttcacgaacctattgacaaagaattcacaatattttttccccatttatgttataatgtacgtgaaggcaaaagtgagcatggagcaaaaacatacgctcatgcttgcatgcagcggatggttctgctccatgtgaacgcgcccgcgagtccgggaagccgcaggctttccggacttttgccgaagcgtacattgctatttgctgcgaacgcgcccgcgagtccgggaaatctatgcctttccagacctgcacagcggcaaaattggaactcttaccctaatattacatacagaggattttcagatgataacctggcatgaagaactgacttttgatttttcagaccccgtttccaacgaggtatttacagaaaactgcattttttttgatattgagacaaccggcttctcgccggcgcgcacggatctctacctgatcggctgcgccacaaggcgcggcagccttttgtgcatcgaccagttcttttccgagaacgccgccgatcaggaaaatgtcctttccgcctttctggatcttttatccggctatgataccattctgacattcaacggtattggctttgacattccatatctgaaagccaaatgcaagacactgcacctttccgatccgtttgatgcacacagttatatcgacctttataaggaagtctcacggttcaaatttctgtttgccctgaccagctacaagcaaaaatccatcgaactgtttctcgggatcgaccgcatcgacgcctactccggcggcgagttgatcgaagtctacaaagagtacgtgcggcatcccgcaaaggattccctcgctctgctgaaacagcacaactatgaagacgttctctatatgccgaagcttctgcccgtcctctcctacccgaaactctgggaaaaagcattttcgctgcagtcgctccaggcgtccgagtaccggtcgatggatggtgtctccggcaacaaggagctgttttttacactggcgctgcagtaccccgttcccaaaccggtctccttctcctacgatgactgttatctctccatgagcggaagtaccgcgcggctgcgtgtgcgtctcttcgagggagaactgcgcttcttttacagcggcagtcccaaggattactactatctccccgaagaggatatcgcagttcacaagagcattgcttccgccgtcgacaaggaacaccgcgtgcaggcgaacgcctccaactgctacggcaaaaaatatgccatctttcttccgcagtatgacgccatgttttccccggtgttccgtgaacagccgcgcggcaggaaatgctattttgaattatccgcggactttgccgccgatcccgctatgcagatggactatgttctgcatctgttagaaaccatgcgttcccaccgcaaataagcgtctggcaggaagccctgataaattatcaaaaaacggcaggaaaaaatctggcatttactgcacagcttctttcctgccgcttttttgctttatagaaaaatgcgtcctctgatataaccttacgccttctcaaagaaaaaggacttgtctctctcaaatccgatctcccggtaattcatgatctgctccgtgcttccgatgaaaagcacgccgcctgttgcaagcgccttatagaacttcgcataaatctcgtcctttgcctcctcggtaaaatagatcacaacgttccggcacacaatcagattgcatccgcctggatacggatcttttaaaagatcatgctccttgaattccacacgtttcttgatctcatccgagatctgatacgaattgccgaccttggtaaaatacttcttcttcaagtcatccggcacactcgcaatactcttctcattgtagagtcccatccgcgccgtatcgatcacctgcttgtcaatgtcggtcgcaattaccttgatgtttgcaagcggcaggtgtctggacaatgccattaccagcgaatacggctcatctccggtcgagcaggcagcactccagattttcagattcttgccaaacttctgaatcagcttcgggaatacctcattctccagaatcttccactgatccggattgcggtaaaactccgacacattgatggtcaggaaattgataaactgttcaaacttctctttgtccttcttgatcagcgccacatactcatcatatgtcgcaatatgattcttcgtaatcagcgtgttgattctgcgccgcatctgcttttccttataagaattcagatcaatctttgcaagcgctaaaatatcctttttaaacttttcataattgtccgtttccagcatattttatccctcgactctctttgttatctacaggatgcaaatacagaaataggcttccaccaacgtgcaagcctatctgtaactctgcaatcatcgaaatcagagattactcctcttcctttgcaaccgcatcaatatctacatctgcaacatctgcatccgcatcttcttccggtgcgagcagtgccttcatagataaactgatcttcttctcttcctcgttgaaatcaacgatctttgcctcgatctcctgtccaacttttaatacgtcggacggcttctctacatgctccttggaaatctgggatacatgaaggagtgcatccacacccggtgcaagctcaacaaatgcgccgaagtctgtcattcttgcaactttgccctttacaacgttgccgattgcgaacttctctgctgcgccgttccacggattctctgccgggaacttcatgctgagtgcaatcttattctcattgatatctttgatgaatacgcgaacctgatcgcctaccttgaataccttcttcgggctctctactctgccccaggacatctcggaaatatgaagcagaccgtctgctccgccaagatcaataaacgcaccgaaatctgttacattcttaactgttccctctaatacatcaccgatcttgattcttgcgaacagttctttctgctgctctaacttcttagcaaccagaagctgctttctgtcgccgatgattcttcttctcttcggattgaactcgctgataacgaactcgatctcctgatccttgtatttggaaagatccttctcgtaggtatctgatacaagacttgccggaataaatactcttgtctcatctacgtttacgcataatcctccatccagtacctgtgcaaccttagcggtcagcacttccttgttctcaaatgcttcctctaatctcttgcttcctttctcggcagccagacgcttgtatgtcagtaatacctgaccctcaccgtcatttacctttaaaacctttgcttccatggtgtcgccgacggataccaatgtggtaaggtctacgtttgcttcgtttgtgtattcattacgagtaatgattccgtctgccttgtagccgatattcagaacgatctcatcaggtttcacatcgataacggtaccctcaactacctctccatttcttattgttttaaatgattcttccagcatttgttcaaagctcatttctgacattcttttgaacctcctcaataatattgtttggggtagaagcccctgcggtaatacctacgttatcgacagacctgacttcggcaaggtcaagatcctttacagtttgtatatagtaagtatttttgcattcgtttttacatatttcaaatagcttctgcgtgttggagctgttcctgccaccgatcacaatcatggcatccacctgctccgcgattgcctgggcttccgtctgacgttcctccgtagcattgcagattgtatttaaaacaattatatcataacctttttcttttataatttcaactaattcttgaaatttattgtaattaaatgtcgtttgtgatacaatacatacctttttcccatgggaagcatcgtatttttcggcctcttcgcgggttccgatcacgcgcgtatcctctgcattcgaccagcttttgatgcctttcacctccgggtggctggcattcccgacgatcacaatgtgacagtcctccccactgtagcgctccaccagccggtgaatctttaacacaaacgggcaggtcgcgtccacgatggaaaagccgagcgtctgtattttctcgcagacacctctctccacgccgtgtgcccggatgattaccgtcccctgcggcttccccgcaagttcgtccatatcgtttaccacaacgacgccctttttctccagatcgcgcaccacttcttcattgtggatgatcggtccgaacgtatagagcggttctttttccagaatccgttcatataccgtatccacggcacgttttaccccgaagcagaagcccgcgctctttgccaagattacattcatattctctataccctcgcataaatctgatagattgcgtccaccacttcgtcgatgttcatctcggagctgtccactaacaccgcatccttggcctgctttaacggcgacgtctcccggtgcatatcgcggtaatcgcggtcttcaatatctttctcgatctcttccagattgcactgggttcccttggcggtcagttcatcatatctgcgctttgcacgcgtcgcaacgcttgccgtgagatatatttttacctgcgcttccggaagcacacaggtgccgatatcccttccgtccatgatgacgtccgtctttgttgcaagctgccgctgcagttccacaagctttttacgcacaaccggatagacactggtcgccgatgccatattgccgactttctccgtccgtatgacaccgtttacattctctccgtttaaaagcacctgctgttccccgttctcatacacaatcgtcacgtcaaccttcgggcaggctgccgcaatcgcctgctcatcatccggcgcaatgccgttctgtaaaaaatagtatgccatggcacggtacattgctcccgtatccacatagacaaacgccagctttttcgccagtttttttgcaatcgtgctcttacccgcgcctgccggtccgtcaatcgcaatattcatactcatctcttcttctctcctcttctattcaatactctcacccgccagatgcccggtcgaccaggcaatctgcagattgaatccgccggtcatcgcatccagatccaacagttccccgcaaaaatacaagcccggcacaagctttgactccatcgtggaaggattcacttcctttacgctgacacccccgcgtgtaatgatcgcttcattaaaatccctgagtccgcagagcgtcagcggaaacgccttgatcagatgcacaaatcccatccgctcctctctcgtgatctcgttgaccttcttctccggatcaatcgctccggcttctaacatcaccggaatcatcttcgccgggaacagatgcacgacggcgtttttaaactgcttattctttgcctcctcgaattcgcgcagaagtctcgcatccagctgttcctccgtgagtgccggctttaagtcgatctccatcgccagttccttctccacgcggcccggcttgattgccgcactggcacttaaaatcagcggcccgcttaccccgaaatgggtaaagagcatctcgccgaattcgtcatacaacagcttttttccgtcccggatgcgcacctgcacatttttcagcgccagcccctgcatcctcgccgcgcaggtctccttcacgtagaacggaaccagtgacggcgtaatctgtgtcaccgtatgtccgagttccctcgcaaaacggtagccgtctccagtcgaaccggtcgtctgataagaaaatcctccggttgcaagaatcacgcgctctgcttcaagaacgcttccgtcggcaagcttcacgccgcgcaccgcgccttccccggtgaggatctgccgcacttccgcatgaagctgcaccataacacccgtgcgctttaatacccgctgcagcgtggcgatcacatccgaagaatgatccgataccgggaatacacggttgccgcgctccaccttcgtcgccagaccattctcctcaaaaaaatcaatcactctctgattgtcataatcgtaaaaagcgctgtataaaaacttcgggttcgtcatcacattggcaaacagggtgtccatatcccccgcattcgtgatgttgcaccgccctttgccggtgatgtagagctttttccctagcttttcatttttctcgagcaaaacgacctcatgtccccgctccgccgccgcaatggcagcaaacattcccgccggcccgccgccgactacgatcaccttactcatacagttccgcatctcctacttttccataccgcatcttgatggaatcatcgatataattgatctcatcgttctcataaacctggtattcgtcccagatatcctctaacatctcaagcgttttcgccacctcgttctgctttttcatgcagagcgccacaatcagcgcattgatcaccgacagcggggcaaccagggaatccacaatggaagccatatcgctgtccgcaatcagattgcaggaagaatagaggttcatcggggaatgcacgctgtcggtgagtgtgattaccttcgcactccggttattcgcaaattccatcgcctttaaagtacgcatggaataacgcggaaaactgattccgatgatcacatcctccttgccgatgcgcaccatctgttcaaaaatctcgctcgaactgcttgtctgaatcagatgaacgttcggaaacatcagggtaaaataaaaagccatgaagctggcaagcggcgcacagctccggattccgatgatatagatatgtttggcgtgcaggatcgtgtcaaccgcgagttcaaatgcgttctgatcaatcttttccagtgtggaatgaatcttgtccgcatcggatttcagcaccgtctccagaatcttcgactggctgatcctgccgtaagtaacctccatgcgctgaatggagttcagcttattgcgcaccagttcctccagcgcactctggaattccggataccccttatatcccagatgcgttgcaaagcgcaccaccgtggactcgctcacacctacaacctcgcccagctttgcagcggtcagaaataccgccttgtcataattgtccgtaatgtaggttgccagccgtttctgtcccttgctcagcttactgtaagcatcattgatgcggttactcaggtcatttgtattgctcatgcttctcctcacttctgcggaattgtgatccgctcaatgtttttattatatcaaatacatggtgttttgcaagaaattatgcatggaactttccttacatgcagcgcatttttctgccgctgcatataataaaccaacgacactcttccattgaggcagctatgcgcgatatcacaccagcaaccaattttattcatacactgatgcagtctccgccggatgcatccgcctggattgccggcggcaacaattttccttccatctccgggcttgcccggttctatgccacagaatacgaaggaactctcgtggaggttgaagtcttcggtcttccgaacgtcgcggctcccggctccagtaatttttacggcatgcacatccacgaaaacggcgtgtgcgtctccccgtttaccagtgccggtgcccattacagccgtacgccggccgaacacccgaatcacagcggcgacatgcctccgcttctgggcaaccagggttatgcctggatggcattttatgacaagcgttttacgattccggaaattatcggaaaatccctcatcattcaccggatgccggataactttacaacgcagcccgcgggcgactccggcgaacggattgcctgcggtgtgataaaatagcaaaaagggcagcaaaaaaagcaggtgactgctcacccgcttttttactgttctattttattataccggatatgctccgttcttggtatctgcgacgcttgcatcgaccttcttctgctgtgcctcacggtacttgaagaattcggttgcaacctgcgggaacagtgcgtaggacagtacatcctcatcctgctgcttccactgcttcatctcagcctcgatcttatccagctccggctcaagcagatctgccggacggcaggtaatggcgttcttcttctcctcgccaagtaccttgtctacgatctccgggttgaacggttttacagtctgaccgtactttccaagcagtacgtctttggtctccttggttgccactttgtagcgctctcccatcagtacgttgaacacagcctgtgtaccaacgatctgtgaggacggtgtaacaagtggcggctcaccgaggtctttacgcacacgcggaacctctgcaagaacctcctcgaacttgtcttccttgccctgctcttttaactgagacagaaggttagataacataccacccggtacctgatataacagagtcttgatgttaacgccgagaaccttcgggttcatcagaccgctctctaacgcttcctcacgcatcggacggaagtagtcagcgatctcagctaacaggttctgatccagaccggtatcgaactctgtgcccttgaatgcctctaccataacctcggttgccggctggctggttcccatggagaacggagacattgctgtatcgataatgtcacagcctgcctcaaccgccttcatgtatgtcatggaagcgacaccggaagtatagtgtgtatggagctcgatcggaaggttggttgcagactttaatgcctgaatcagctcggttgccttcgtcggaaccaaaagacctgccatatctttgatacataaggaatcagcacccatatcctctaccttcttcgccatctccatccagtaatccagagtgtaggcatcgccaagtgtataggataatgcgacctgtgcatgtcctttctctttgttacatgcggtaacggctgtctgcagattgcggacatcgtttaagcagtcgaaaatacgaatgatatcaataccgtttgcgatcgatttctgtacgaaatactctaccacatcatccgcatacggacgatatcctaagatgttctgtccacgaaacagcatctgaagcttggtgttcttaaatccgtctcttaacttgcggagacgatcccacggatcttccttcaggaaacgaaggcatgcatcgaaggtagcaccgccccagcactcaaccgcattgtatccgaccttatccatcttgtctacgatcggaagcatctgctcggttgtcattcttgtcgcaatcagggactggtgcgcatcacgcagcaccgtctctgttatttttaaaggttttttaacaacttctgacattttttcctccttatcagcggatactttgataccgctatccgtctatgacggcatttgctctttcactaaattccgaaaattgccatgaatacaccggctgctactgcagtaccgataacgccggcaacgttcggtcccatcgcatgcatcagcaggaagttcgtcgggtcttcctctgcaccgactttctgggatacacgggctgccataggaacggcagatacaccggcagatccgatcagaggattgatcttgccctttgtgaggaagcataacagcttaccaaacaggacaccggctgctgtaccaaacataaatgcaatcagtccaagtgcaacgatctttaatgtcgttgtatttaagaatgcctccgcactcgtagatgcacctacggaagtaccgagcaggataactacgatgtacatcaatgcgttggatgcggtatcggtcagctggcggaccacaccgctctcgcggaacaggttaccgagcatcagcataccaaccagcggcgctgtcgtcggaagaatcgtacatacaaccaccgtaaccacgatcgggaagagaatcttctccagcttggaaaccggtcttaagttctccatcttaatggcacgctcttttttggttgtaaacagcttcataattggtggctggatgatcggcacaagtgccatataggaatatgccgccacagcgatcggtcccatcagtcccgactgtcctaactttccggcaaggaaaatggaggtcggtccgtcggctccaccgataatggaaacagcagctgctgccttatcattaaagcccatcatgattgcaaggaagtacgctccgaaaataccgaactgagctgcagctccaagcaggaaactgatcgggtttgcgatcagcggtccgaaatctgtcatagcaccgactccaaggaaaatcagagacggtaagattgaccactcgtctaacacataaaagtagtggaataaaccacctacaccattgctcatctgctccgggtctgcaaaaatatccggatagatatttacaagcagcataccgaatgcaatcggaacaagaagcaatggctcaaaccccttcgcaatagccagatacaggaaaaagcatgcgacaatgatcatcacaaaatttccccaggtaaggttaaagaaagcggtctgatgcaggaggttccccattgtctcactaaaatagctcattgtcttcctcctaaattagtttaatgttgcaagtaatgcgcccgcttctaccatatctccaacacttacgttgatacttgctaccgtaccgtcctgcgttgcaacgaccggagtctccatcttcatgatctcaagaaccatgatgctgtctcccttcttaacggcatcaccgacagacttctcaagtttgaatacctttcctgctgcgcctgcctcgatcttaacgctgcctgcgcctgcagcagcagccggctttgctgcaggtgctgccgccggtgctgctgcacgtctcggtgctgctgccggtgcgctcactgcgccgttctcttctacggttacatcatatacattgccgtttactgtaattgtatagcttttcattgaaatatcctcctaatatgatttcttttcatttatacgaattagcgtctgcggatcgatctcacaacgaaagaatccgcggatgcaccggtgcttgccgcaaccgctgcggaaataactgccacaagttcaagatcatcggtaagctgctcttcacgctgtccgatctgctctaccacagcgcctgcctctgcctcgttcttcttgcccttgccggccgccttgttctgtattacagagataaagcggaaacagtaaataataaggctgatcaggatcagaaccacgaatacggttcccattcccatcagggtatttaacgcagccttctccatcttctcacccagcgtgtataccttgtccgcggatgcatcagtaagctccggctgctcggtctcgtaattgtatgtatagatgtaagaaacgatgacttcacgattctgatactctacatactgatctactgttaaggttttctgtgcctttgtgatattgaattctccaagtccctgatatgcgccgacatcacttgtcgcctcatcccagctctcgacaagtttcattgccgtatcgctgccgtaggactggatataggttctgttgtcgtccgtaagaccaaccagcgcggaaacttcctgttccatgctgctctgcagttcatcgtaagtcattccgaaatagtcaaccgttgtcggatctgttccgcatgctgcaagtcccagagccataaagcaaagacaaagtataagagataattttttcttcataaacttcacctttctattttgttccatgtttcttgtccggtgtatatgcacactttgtgtataacagttcaaacgcatctaccagatactttctcgtatctgccggatcaacgatcagatccacatagcctcttctggctgctgtcataacgctgccctgcagtgcatcatattcctttgccttctctgcaagctcatccgcagatgcatccgcgtacatgatctttactgcaagatccgcatccatcatgccgacctttgcgtccggccatgcatatacgaaatccgcaccgatagacttggaattcatagcaacataagcggtaccgtatgcctctcccgtgatcaggttcaccttcggacatgtagctcccgcaaatgcggaggtcagatgagcaagtgcctttgcaagacgcttttcagagcacttgcatgccttgtagcccttgacatttgtcagagtcagtaccgggatctcgaatgcgtcgcagaaagatacgaactctgctgccttctcacatccctttgcggaaagaacattgtcaaacttctcgctctctttgccctcttcgtcgtataccgttgtgcagtttgcaactgcgccgaccgtcataccgtttaacttgataaatccggtcaccatgtctctggcatagcctgcctttgtctcgaagaatgtatggctgtccgaaatctcactgagaagatatctcggatcacccttcatggcatccatgctctcgcatgcacggttcaggtcatccgcacactcgtctgtgtagacatctccctcgttgttgagcggaagcatgccgaccagctcacggatgtctgcaaggatctcatcctctgttcccgtcgcgtcgatgcagccgttctcatctgcctggaatgccgcagatgatgtgtcgcacttctcgatgcggtttccgtcaattgcgttcggagaattcacaaacatctttcctttggattcttcgataaaagcaaaatcagaaagtgccggtaccactgccagtccaccgccgcagctgccgaatacggctgaaatctgcggaaccacgccggatgctgcaacttcttttgcatagatcagtccgaagccgtcaagcgcatctacagactcctgtaaacggactcccgcgcaatcgataaagccgatcaccggtgctcccatcttcatcgccatgtcatacactgcagcgatcttcttcgcatgcatctcgccgattgttccgtttaaaacagaagcgtcctggctgtaaatgaacaccagattgccgtcaatcaggccgtgtcctgtgatgactccgtcggaaggagtatccgttgctgcaagattaaaatctgtgcttcttgcggttacgagagaaccgatctcaatgaaactgttctcgtcgactaacctggtgatgcgctgcatagccaggctatcattgctactattcattctttttgccctccatctataaattgttgtccacatccatttgggatgcggcttcatagtgaatgatgtaaatccatgcgtctttgtataaaaattcaacaaattacgctatgttaaattataattgcttttctgcaatatttcaagtaaattgttaattttttgacgctttttgtttgtgttttttattcgatccagagaagccgaagcacctgccccagacaccacggataatcgatctttccgattgtctccccggctaccacacatcgctccgcaagcgtctcctcccccagcatataacgaatcttcccgatgtaatctccgctcttcaccggtgcatacagccggtctgcaatctcatacctaagcgtaacctcactgcttagcggcgccaggatactctcctcccctgcatagttcctgacaaccagttttaaatacaccgtttcgccgatttttccgccctgtccgtcccgcacctctatgggcgcaagctccgcttcgtccggctcaatctgcagcaggtcgatctttttgaactgctccaatccgtaattcatgagttttctggtgtcggaccacttataggtcttgttgttcggccatccacaggcgagcagcgccacgatcagcgttttgtcctcccgctgcagcgctccgacatagcagtatccggcggttccggtaaatcccgtttttccggaaagcgccccttccatcatctgcaaaaatgcattgtggttcgtgcactggtacgtgcatttcccctctgcatcagaaaaagaatactgcgccgtccgtgtaatctcgagaaattcgtcgctttttaacgattccttaatacaatatttcataatcttagcaaggtctgccgccgtcgtgtgatgaaacccggcatcatccttcgcatccagtccgttcggtgtaataaagtagctgtcctcacagccgagttcctctgccttcgcattcatcagcgcggcaaatccctgcacctcccccgccgcaaattccgcgatggccaccgcacagtcattgtaggattccagcatcagaccatataaaagatccctcagataaaactgttgtccctcgtgcatccccagatgtaccttcggctgggacgccgcattttttgacaccgtaaccacgctcgccggatcacagttttccagtgccacgatacaggttaaaatctttgtcgtactcgcattcgccatcgcttcatgcccgtttttctcatagagaattcttccggaatccgcatccatcaaaacggcagattttgcgtacagttccgactctgccggcacatcctgcgcccggacacgcacaggcgaaaaaataagcaagctcatacttaacaatagagaaagaaagcgtcgatacatgccattctcccaaaatgacttcactgatgtatatgcgtccctcattttttgcagaacagaaacggtatgtaaaaaggaactgccgcaataagcatatcgtgctttgataagtaatattattagaaacacacttggggatttcatgtggaaatgcagatggaatattcgttggagaaaaatgtgagcatttcttccggctgaatgtttgcatcggattccgtgtctcttccacgtttggacaatccgacgggtgcatgtccggcacaccggagacaatgggcggactttctggtgtccctaagggcacctcttcgcagacaatataaaaccgcgcgaaccgaaactcgccggcatctgctattgaaaataaggcagatgccgactcagacatcggcttcgcgcggttatgttttgcttagaggtgccataagggacacacacaaaagtcctacaaattgtcttccgggatgcggacatgacccgcggagtgctccaaannnnnnnnnnttggttagaaatgccacattttttgaaccgaatttccacctgcatttccatctgaaatcccacggtgtggtcttctgataatattacttatcacccaaagcggtctatgcttgttgcggcaattccttattatccgtctctcacagattcgcaccaggatttcttttatgttctatatatcaagcttcatatgcatctcggcttccgcctcctgcttaaattcctccacctgcaccggatttaataccgggagttcgtcgattgactgtaccccaaagcttcgtagaaactcttccgtcgttccgaagagcagcgggcgccccggtgcatccagtctgccaagctcgcataccagattgtattccaccagcttgttcaccgcgtgatcgcaggaaacaccgcggatcttctcgatctccaccttggtgatcggctgcttataggcgatgatggacagcgtctccagaagaacatccgtcaggacatggcgctttggctgtctcgcaatcttgatcagatattcgtacatctcgcttttggtgcacatctgatacgcatcgtccagctcaatgatcttcacaccgatggacggattctcgtagtgcttcatcatcttctcaatgatcgcttttgtctcttttttatccagttctatggctgcggcgatcttgtccagctctaccgattctcccatcgtaaagaggatcgcctcgatgatcgcctcgtaattcttttcattcatcccgaaaactccaactctatgccacaatctttgactgaatcagaatatcatcaaaggtgtgttcctgtgatataaatatcttgcctgtcttcatcagttccagaatggcgagaaacgtgacaatgatctccatcttgcccgcctgtgcctcaaggagactgcggaaactgaaccggctgtgcgtcaggcagtaattctccagatatgccatcttgtccgaaagcgatacctcttccttctcaatcttgccgaacttggaacggatcggatcaatcttgtccacctgctttttcatgatggacttaaaaatctcattcaatctggcaagcgttacatccgagacgagctcctccatgttgaccggctcctcatactctgccacctccggcggaatggtcggctccttaaaaaggacacgctccgcatccatctggcggtcacgcagctcgtatgccatacatttgtacatcttgtactccaaaagctgctgtaccagttccgcacgcggatcctcttcttcctcgtcctccgtctccggagccggaagaagcatgcgggatttgatgtcaatgagtgtcgccgccatgacaagaaattcgcttaccacattcagatcctgacgcttcatctctgcgatgtattccatatactgattcgtgatctccacaatcggaatatcatagatatttactttattcttctcgagcaagtgcaaaagcagatctaaaggtccctcaaatacctgcagttttacggtcatttccatctgattctcttatcctctccggcggcagaacctctctgccacatcttcaacgtatcaattttacattgtttccccgaaaaattcaaggttttttcctatatttagtattttcgcacaatcttttctactataattagtgtttcaaatgagagtttcccgcgggatgccaatttctttttgtgcacgctgcataatgtacaggttcttcctctacaatagtaacaaaaagaatcctggagaataccttgaagcagtttctttcttttctgttatgctgcaccctcactctctcttctcccgttcttgcggcggaaaacagcgaagccgacctttccgtctcggcgccgagcgttcttctgatggaggcgtccaccggaactgtggtctacgaaaaaaacgcacatgaaatccggcatcccgcaagtatcacaaaaatcatgaccctgattctcattttcgatgccatagagcgcggacagatctccctgaccgacacggtgaccgtgtcggaatacgctgcaagcatgggcggctcacaggtgttcttagagcctggggagacccagaccgtagagaccatgatcaaatgtatcagcgttgcgagcgccaacgatgcctgcgtcgccatggcggaatatctctgcggttccgaatccgaattcgtccgtcagatgaacgagcgtgccagagggctcggcatgaaagacaccacctttgtcaactgctgtggtcttgatacggaagggcacatgacaagcgcctacgacgtcgcccttatgtcccgcgaactcaccgtaaaccatcccgaaatccacaactactgcaccatctggatggaaaacatcacccatgtcacggcaaagggaagttcggaattcggtctgaccaacaccaacaaactcatccggcagtatgagtatgccaccggattaaagaccggttccaccagtctcgccaaatactgcgtgtctgccaccgcagaaaaagacggtctggaactgatcgccgtcgtcatggcagcgcccgattacaaagtgcgctttgcagatgccaccacgcttttaaattacggattcggaaaatgccgcctgtacacgaatgaaaacacggacgctctgcccgatcttcctgtgacaaagggcaccgaaaccgccgtcggtctcgcctacgactctcccttctcctacctgtctgtaaaaggcgaggacctctctgatgtaaaaaaagagcagattctccccgagacggtcacagcacctgtcagaaagggtggcgtggccggcagggttgtctactccgcaggcggcagggaactcggctccgtgaatatccgttacactgcggatgttcacgccgcctcataccgcgattatttcaagatggcgcttttctatcttctgacctgacttttttctattataatagcggtgccagcaggcgcagcacactctgcagaagccgtaccggtaccggccggtttctgcagaactctgccgtcatctgctctgagcacgcaaacgtattcaggcagtcttcctttacctgtgccacaaccgcggagcggtagaagaaaacgccgcactcgaaatgcagatacaggctgcggaagtcaagattcacgctgcccaccgttgcgatctcatcgtcacagacaaaacattttgcgtgaataaatcccggcgtgtactgataaatttttaccccgctttgtatgagcggtgcatagtaggactgcgtgagcaggaaaatcatcttcttgtccggaatccccggcgtcacaatccgcacgtccacaccgtccttcgccgcgttgcagagcgccgtcagcatctcatggtcaatgatcagatacggtgtgaagatatagacgtaattctttgccctgtttatgatattcaggtaaatattttcgcccacattctcatgatccagagggctgtcaccgtacggctgcacgaacccgtcattctcaaagggtgctttctgatgctgtgccggcataaaccggctgtaatcttccgtggaatggacgatgtaattccacatggacaaaaacatgctggtcagactccagaccgcctcgccctcgatgcgcacgccggtgtccttccagtagccgaaccgttttacctcattgatatattcatctgccagattgatcccgcccgtaaaaccgaccgcgccgtccaccacaaaaatcttccggtgatcccggttgttcatgattaccgagagcaacggccggaacggattaaaggcagcgcacttgatgccctttttctgaagctgcttataataccgcggcggcagtgtgccgatgcagccgacatcatcgtagatcaggcgtacctccacgccctctttgacctttttctccaggatatcctcgatctggtggaacatatgtccctcctcgatgatgaaatactccagaaaaataaagtgttccgcgctctccaacgctgcaagcatatccgggaacatcgcctccccgctctcataatactttgtggcggtattccggtagaccggaaaatgtccccagtccgcaatatattttgactgtcgtaagaccgatggatccgcctcctgcagcagccggaccgcctcctcgtctaccggcatgcaggcatccactttccggttcacggcatccatctgttctctggtgtgcttcgtcagaccggagcgtccaaacaggaaatacaacatgattccaaggatcggcgacaacagaatcagaaacgtccaggaaagtttattcgccggattctcccacttgttcgcaatcacaagcaccagaacaatcgccgcagcgcggattatcaggttcgcataggtgaactgatagctgaatttccacagcaccagaaacagccagcagatctgcagcaatatcgaaaccccgacaatggtcaatcttcccatcagaaggtgtgcaatcttcttcataagtctcctccctttcaaaaccgtatcctttatcttacgttttttcatataaaatgtcaaccgccggtcacgtcccctccccttcccttcctttccgtcttgcagcattctattttcttcagcctcccgctcctcttcagcctctcaccagatggtcgacatgaatcattccccagcattttctgccaagctgctctccccgcggatacgctctctcgtacaggcgcagcttcatctccgccggcgacagatacggatacttctgaaatgcaagcgccagtgcacccgtgacaaccggcgccgccatggaagtcccgctctttacccggtatccgtttttttccctgccgcagcttttaatcgccgtgcccggagccaggatttccggctttacaatacagcatgccgtcggaccgttgctgctgtaccccgtcttaagcccccgcttccccggctcgctctttccgtcgtcactgcttccaatcgttacaatctttcttgagattccgggaatggtcaccgaattttccttagggccgttatttccggctgccgcgacaaccatgatccccctgtcccagagatcgtccaccgcgctaagaagttcctgctgttcccgctctcccgcgcttggaagcattccaacggaaatattcaacaggcggatctgatattcctgctggttctttgcaatccactccattcccgccagaacatccctggtatttccgttccccttggcgtctagcacctttaacatcacgatatccgcctgcggtgcaatgccgtggcaaaccggcatcccgtattcttttctcgatgcctcgccactgcccgccacgattccggacacatgtgtgccgtgaccgttgtcgtcgtacagtcccgtctttccttcacagaaatctccaaaatatcggatcctgttcccgaaatccacatgcggaacaattccggtatccataatcgccacggttacatttttcccgctcaaacctgttttatatgcataatccgtatggatgatttttctgacccgattcataaaaaatgccttttcttatagcttatgcaaagccatagaaaaggcacttcatttctgttatgcaattaccggtgcatgactgctttatgcttccgccggaacatctttgatggagaagctgattcttcccatcttatccttgccaaggcataccaccttcaccttatcgccaagggtcagtacatcctccacatggttgatgcgctcctttgcgatcttgctgatgtgaaccatgccttctttacccggtgcaaactctaagaatgcgccgaactccttgatgctcactaccgttccggtaaggatctgtccctccttgaaatcggtcgtgataatccggatcatctcgatggccttatccatcatctccgcttccgtaccgcatacggatacggaaccgtcatctgtgatgtcgatcttcacgccggtgcgggcaatgatctcattgatcgtcttgcctctctgtccaaccacatcgccgatcttctccggatcaatctggatctggacaatcttcggtgcatactcgctcacctgcttgcgcggctctgcgattgccttggacattacctcatccataatgtagattctcgcctctcttgttcttgcgatggcttcctctacgatcggtctggtcagaccatgaatcttgatatccatctggatggcggtgatacccttgtgcgtaccggttaccttgaagtccatatctccgaagaagtcctcgagaccctggatatctgtcagaacaatgtaatcgtcatcggtatctccggtcacaagaccgcaggaaatacctgccaccatagccttgagcggtactccggcagccattaaggacatgcaggacgcacaggtcgacgccatggaagtagatccgttcgactcgaatgtctcggacactgcacggatggcatacgggaattcctcctcggaaggaagcactgccataagtgccttctcagcgagcgcaccgtgaccgatctcacggcgtcccggtccgcgggataccttggtctcgcctaccgaatatgccgggaaattgtactgatggatgtatctcttcgtcgtaatattctcatccagtccgtcgatcttctgaacctcggagagcggtgcaagtgtcaccacatcgcagatctgtgtctgtccacgtgtaaacatcgcagagccgtgtactctcgggatcagatccacctctgctgccagcggacggatctggttgatggcacgtccatccggacgtttatgatcctttaagatcatcttgcggacagtcttcttctgatactggtaaactgcctcgcccagaacagcaagccactcctcattgtctgcgaaagcctctgccagcttgtccgtaatctcgcggatattctcctcacgctgctgcttctcgtctgtgaatacagcctcctccatctgtgccggaggaaccagttccttgattgccgcaaacatctcatccggaattgcgcagcttgtatactcatgcttcggcttgccaacctcttccacgatcttattgacaaacgcgatgatcgtctggtttacatcatggcacttgtagatcgcctcgatcatcttgtcctccgggatctcattggcgcctgcctcgatcatgatcaccttctctgctgtggatgccacggtcagctgcagatcacccttgtcccactccttctgggaaggattcacgatgaactctccgtccaccatacccatctgcgtcgttgcacacggacctgcaaacgggatatcggaaattgtggtaaccagtgcggaaccaatcatggcaacgatctccggacggcatgccggatctacagacattaccatgttgttgatcgtcacgtcgttgcggtaatccttcgggaataacggacgcatcgggcggtcgatcacgcgggaggttaagattgcattctcggatgccttaccctctctcttgttgaatcctcccgggatcttgccaaccgaatacatcttctcctcgtattctacggaaagcgggaagaaatcaatgccgtcacgcggcttgtccgatgccgtcacggtagaaagcacggtcgtctctccatattttaataaagctgctccatttgcctgtgcgcagactcttccgatatcaacggtaagtgttctgcctgcaagttccatcgaaaaacttttgtacatgcgaattctccttttctgattctctttcattctcttcttcggttctgccggaaggatcccgcaaaaccactctgcagaagcaccgaaactactgaaatacatacactgcacgtatctatatttcagtggtctcggggatacgcttctgtcagattgccatgctgcacggaagtgcctccatacagtaaaaatagagcggggaagctctccgctctattgataagcgggcatgtctgcccgctttggacatcttattttctgagacctaaacgctcgattaaagcacgatatctctcgatatctactttctttaagtaagcaagtaaaccacgtctctgaccaaccatctttaaaagacctcttctggagtgatgatcgttcgggttctcctttaagtgagcggtaagctcctcgatacgtgctgtcaaaagagcaacctgtacctccggtgaacctgtgtcattcggtgttcttccatactctgcgataatgttctgcttcttgtcctttgcgatcatgttctgatcctccttataatattctgtttggatggcttctgccataccgggcccttttggcccatcgcccgactgtgtatgatactcagtaaaaggttggagtgtccatttaccgaatatgggctgaactcatactctcgtattatagcatagctgcatacgcttgtaaacaactttttaattattgatcacacgcacaactttgaccggcgtacggtaataggcaccggaaatcttgatgccggacttcggtgaacttgcatgtaccacctgtccgttgccgatgtagattgccacgtggttgatgcggcttccgtttccgtagaagaacagatctcccggctgtgcctcagaggccgaaatcttcgttccacaattcgactgcgcgccggaagaatgcggaagggaaatgccgtagttggcaaatacgctcatgacaaaaccggagcagtccgcacctctggtcagacttgtgccaccccatacatacggattgccgacaaactgtgtcgcatactgcaccagcgatacacgcacatccgaaacaccctgtccataccggatctcagtcatggtcatcgcctttaaaagctctgtcgagatctctacataatcggaagagacatatccctcatcactgtcgacgttgatcttcacccatccgtcaagcacctcgagcacctcgagttcctcgccctgcggcatcattgtgacaatcgcgcagtcggtgttcggctgctctctgacgtaaagggttgtcgtcgtcacggtggcaagcgtctgctttacctcatccgctctggcaagcgccgcatctccggtcagaagatactccgactttacataaccttccacggaaccggacttaatctgtgtccattcgccttccacgccgaggatctcacatcctgcgttgttcggcatcttgcccacgacatctgcatcagtgcctgccgctgcacggacgttgagattgccctcaacattcgccacaccgagattggtatatccgtaagcgctcgccgcctgctgtgcggcatcctgctctgtactctctgtctgctcctctgtgctctccgtctctgtaagttcgtcctgcgcctgtgaggccgcggctgctgcatctgcaagctctgccgatactccggcagcggcagaagacgtcgatgcatccacatccacacccgcctctgctgattcggtgccctcttcaaccgcttcctgtccctgtgccgttcttgcaatgtccattccggaaacaccggccacgcccatcgccgcgtcactgagacttccggacagtgcgctggtaacaccggacgccacggttgcactggtatccgcatctgtattctttgacttctgatctattgccgctgtggaaaccaccagagttcccgccaggaccaaacctgcgattctcgctaatcgtgctttcatatgactctccattcttgcgccgtctcctgcgcaattctagtttgtgctcatttttaaatctaacgtccagtatagcaacgattttttacgatgtcaacatatttttgtaacatttatgtaataattattacgaggtgtgtttttcaaaataggcacggccataggcaacatcgttctgcatctgctctttgagcgcctcaatcgatgcaaatttccgctcgctgcggactctgcttaagaactccaccgtcaccatcttatcgtagacatcttccgcgaaatccagcagatgtgtctccaccccgacaggatactctccctcaatcgtaggcttgcaccccacgttgctgatgccgcggtaccaccggtctccgatgtatgcctccgtcacgtagacaccgttcggcggcagcagcttctccttcggcggcagctggttgatggtcggaatcccgatcgttcttccgatctggttgccgtgcaggactctgctggtcacaaagtaacggtatcccagaagatgatttgccttctcgatattcccggctgcgatctcttccctcacgaacgtgctgctgatgtcccggctgtcttcttttattttctccacaacgatcacttcgtatccgtattttccggcatactgccgcagcatatggtaatcgcccctgcggttatgtccgaaatgaaagtcttcccccacaaccatgcactttacatgaagctgccgcacaatcttagcgatgaaatcctccggctccatgcacatgatctcctgcgtaaacgggcactccaccacataatcaatccccaggtgctcaaacatgtgccttttttcctcattcgtggtcagcaccttcgcctccacattctgcacatttctgcgaggtggaatgtcgaaggtaaaaatcgctcccgcgagaccttcgtcctttttctttgcaaaatactgcagcagctgctcatgccccctgtgaatcccgtcaaacttgccgagagaaagtaccgtattctcttctatataaaaatccgttgtgttcctgatatatttcatgatctacttaaacacctttaatggtttatagtcttccttttccgcctgatattcataaatgccgaaaaatgcgccttcatcgtcgtagacgcggaccggcgccattctcatactctcatgttcctccaaaaacatctccgggcgcagccggtttccgttatataaatatttgcggaactgtccgtccaccgtcgcgctctcatattttagaaagacggtatccaccgcctgaaggaacggaagctgcagttcttctgtctccgtcgcatccgacctgtgtgcaatcacgtacgcctccacctcggacagctttatggcgtccgcaagcgcgaactctccgactctcgtgcggagcagcgattccatgcacgcaccgcagccgagcacctcccccacatcctggcagagcgtgcggatatacgttcccttggaacaacagacacgcatcctgacacgcggcagttcgatcgaaaggatctcgatggaaaaaatatgaaccggacgcgccgcacgttccacggtcacgccggcccgtgccagatcacacagcttcctgccgtcaacctttaaggcagaatacatcggcggcacctgcatataatcacctacaaacgagagaaccgctttttccacttcctttgcactgcagcgcacctcctgctgcgtcagggtctcgcccgtcacatcctgcgtgtccgtcgttcttccaagcagcatgacagcctcgtattccttcgtcttgtccgtcagcagttcgcagatcttcgtcgccttgccgatacacaccgggagcaccccctccgcatccggatccagcgttcccgtgtgtccgatctttctggtctttaagatcccccgaagcttagccacgacgtcaaacgaggtaaatcccttttccttatagatattgataattccattcatcatactgcttttttctcactttatctgttctgccagatccgaaataatctgttcgatgatggcatccgcatcgccagtcatggaaaatccggctgcccggatgtgtccgccaccgccgtactttaccgccaccttcgagacatccaccacttccctggatctggtgctcgccttaaacgtgccgtctcccgtctcatacaaaaagactgccacttccacatccttggtcacgcggagctgattcacaatgccgtccagatgctttggcagcacgtcatactgcgtcatctcctcctccgtgatcacgctggaaatacattttccgttcaggtgcagcctgctctttaacagtgcaagccccataatgcggttctggttgtatgtctttgtgtagaaggtatcatccacaatcttcggataattgatcccgcactccatcagcgctccggcgatctccatcgtctttctcgacgtacacgaatactggaagacgccggtatcatgtaccattccggtataaatgcactcggcaatctcctttgtgatgcgctcctttggaagcagttcatagacaagctccgacgcggaacttgcctgcgggaaaatgtagttgtcctgtgcaaagctctggttgctgatgtggtgatccacacagacggtatgcttcgcctgctcaaagaaatgcgccgcaccgcccagacgtcccgtatccccgcagtcctgcgcgataaacagatcgtataccgtatccccggaaaaatcggagacgatctcattggagcgcgccataaatttgaaaatattgggaatcggctccagataaaccgtcacatcaatgtcgggataccatgttttaatgtaattataagtagcaaggcaggagcccacacagtcaccatcgggacggatgtgtccgccgatggcaaccgtatgaacctctgccagaaaatcatcaaaattcgtcattcttctgtttcctcttccgcctcatccgcccgatcaggaatatcctttgtcacatcgtcaatcatcttggacatgcgcacaccgtactcgatggactgatccagcacaaatgtgatctccggcgtattcctaaggttgatgctgtgggcaagctgcctgcgaatgtacccctccgcacttctaagacctgcgagcgttgccttctgggattcctcatccccgagcacgctgatataagccttgcacgttttcagatccggtgcaacctccacggtgaccacgctggtcatcggattgatccgcgggtccttgatctccccgcggatgatattcgacaactcgcgcagcacttccccgttgatccgggtatttttaatactgttttttctcaatttctagctccttccatacacgcaaaacgtctgttaacgcggtacctccaccatcgtgtatgcctcaacgatatcaagctctgcaatgtcattaaagccttcaaagacaagaccgcactcgtatccggcttttacttccttcacatcgtccttgaaacgctttaaggatgccagattgccctcgaagatctgctctccggcgcgggaaatacgaaccttgcagcctctctggaacacaccgtcaagcacataggaacctgcgatatttccgattccggatgccttgaagatctgacgcacctccgcatgaccgagcaccttctcctcgaagatcgggtcgagcattcccttcattgccgcctctacatcctcgatagcattgtagatgaccttgtagagccgcatatcgacgttctccttgtccgctgttgtcttcgccatcgggtccggacgaacgttgaatccgatgatgatcgcattggatgcggatgcaaggctgacatcggactcgttgatggcaccgacaccgccgtgaattacttttactactacctcttcgttggacagtttctccagactctgctttacagcctccacagaaccctgtacatctgccttaacaataatatccagttccttgacgttaccggactgaatctgcgagaacagatcatccagcgacatcttcgccttggtatcttcgatcagacggttcttgccttcggaaatataggtctcggcaaatgctcttgcctccttctccgtatccatggcaacgaatgtctcgcctgcctccggtaccgatgaaagtccgagaatctccaccggtgttgacggtcccgcttccttgactcttcttccctggtcgtcaatcattgcacgcactttgccgtagcagcttccgcatgcaatcggctgaccaacctttaaggtacccttctgtaccagaacggtggcaactgcaccgcgtcccttatccagacgagcctcaatgacaaggcctctcgcattacgcttcggatttgcctttaactcaagtacctctgcggtcagaaggatcatctccaaaaggttctcgataccttccttagtatgtgcagataccggacaaaataccgtgcttccgccccaatcttccggaatcagttcgtactcggacagctcctgctttacgcgctcaatattggcactcggcttatcaatcttattgatggcaacgataatctcaactcccgccgcctttgcatggttgattgcttcgatcgtctgcggcatgacaccgtcatctgcagcgactaccagaatcgcaatatcggtggaatttgctccacgcatacgcattgccgtgaatgcctcatgtcccggtgtatccaggaatgtgatgttctgaccgttgatcgaaacaacagatgcaccgatatgctgtgtgataccgcctgcctctttgtctgtcacacgggtggagcggatcgcatccagcagggatgtcttaccatgatcgacatgacccatgacgcagacaaccggcggacgtgccacaagtgtctcttccggatcgtcttcttcttttaagagttctgcgatcacatcgatcttctcttccggctcacagatgcagttgaactcaagcgcgatctcctccgccgtctcatagtccacttcctggttcaccgttaccatcgtgcctttcatgaaaagcttcttcacgatcacggacggctgcactttcatcttatcggcaagctctttgatcgtcagcttctccggcagaacgagtgtcttaatcacatcctcttcctgcttcggctgcggctgctggttcggcttcttcttgccgccgttcttctccagatttacgaagcgctcctgcttcttgccgccaagtgcatcataatcgtttctctgtctgtcgttcttgttgcggtctttctcgcgctctctggactccttgccgcgcagttcctctgtggatgctgcggtctccttgttcatacggtcgatctcacgatccagtctgccggacgggttgccaccgcggtaaccattgccgccacggcctccgtttctgtctccctgaccaccgtttgcgccaggtcttcctccgccgtacggtcttcctccgccattattgccgccgcggttgccgtatccattctgtcccggtcttctgtcgcggtctccctgcgggcgacgatccccgttcatcggacggcggtctccgtttgctcccggtcttctgtcgcggtctccctgcggacgacggtccccgttcatcggacggcggtcacggtctccctgcgggcgtgcctgcggattctgtgcatatacgttctcatacacattctcgtatacattttcacggcgttccggctgctttgctgctgtctcctgcggctttttctccggcgctgccgttctggccgcctttgcgcgctccgctgcctgacgctctgcctcctcggctgcctttgcagcctccgggttgattgcgcgctcaaatgctctcttgacatcaaagctgtttgccggtcttgcctgacgctgctccggtctgcctccctgtgggcggcggtctccattcatcggacgacggtctccgttcatcggacggcggtcacggtctccccgcgggcggcgtccgcctccctgcttgctgtactgcggattaaataccgcggtaatgctggacttcttctttggacgctccggtctgccctccgcgttctcagcagccttcggtgccgcttccgccttcggtgccgcttccgccttcggtgctgcttccttcttcggcgctgcctccgccttcggcgctgtctccgtctttggtgctgcctttttctggaacttgtcgcgcaccattttctgcacatcatcctcaatgctgctgctgtgcgactttaccgcatgctccgtcgtacttaaaaattcaataatctgtttgttttctattcctaactcttttgcaagttcatgaactctcatttttgccatatatcctgtttcctccattattcagttgttaacgtcagtttcaatttatcttcgatcgaatgggccagcccttcgtttgtcactgcaagcgatgcacggaattcctttccaatgaaatgtcccaatgtctctttttctccgtacacatacatcggaacttcataaaaagtcgtcatatcccggaaatgcttctgtgtattctcagacgcatccgacgcgacaatgacaagccatgccctgccatccttcaccgctttttctgtggaaaactctccgcttgccacaccgcccgccttggctgcaatgccaagcatcgacaacactttatctggtttcaaacttctccatctcctttgtcagtgtatcatagacttcctttggaattggcatttttaatgatcgttccagacccttgttttttattgccgcgcgcaggcactcactgttcggacacacataagcgcctctgccgtttttccgccccgtagcatcaagtacaatctgtgaggaggcctcatcttccgccgccgtcttgattacccggatcatatcttttttcggcttaagctctctgcaccccacgcactggcgcattggaatctttttgtttgccattctctgatcaacccctgcctactcttcttcattctctgtgtctgtctcatccgcaagttcggattcctcagcgtattctccctcggcatccgcatcctcagcatatctgtccccggcatactcgccgtcttcggtatattcgccgtcctctgcgtactcgtcatcctcgtaatactcgtcgtcctcgtactcgctctcataatccatgaagtcgccggactctctggcctgtgtctcgctcttgatgtcgatcttaaagccggtaagtcttgccgcaagtctcgcattctgtccttccttgccgatcgccagggaaagctgataatccggaacgatgactttcgccgacttctcctccgcatccgcgataacagaaataacctttgccgggctcaatgcgttctcgatcatcattgccggattctcattccaggtaatgatgtcaatcttctcaccgcgcagttcgttgacgatcgcattgactctcgcaccgttcataccgacacatgcgcccaccggatccacatccggatcattggaccagacggcaatcttggttctgcttcctgcctcccgcgcgatcgctttaatctcaacgattccctctctcacctcggtcacttcagactcgaacaggcgctttaccagctccggatgggttcttgacacgagaatcttcggtcccttggacgtatccttcacctccaggatatagaccttgatgcgctcggtcggctggaatacctcgcctctcacctgctcgttctcggtcaggatcgcatccaccttgccaaggttgacgctcacatttcttccgatgtaacgctgtaccacaccggtcacaacatccttttccatgctgtaatactggttgtataaaaccttgcgctcctcttcacggatcttctgtaagatgacattcttggcattctgtgttgcgatgcgtccgaactccttggactggatctcgacattcacgatatctccgatctcgtatttggaatccaccatcttggcattgacaaggctgatctgctctaccggatcctccacctgctctactacggtcttctcctggaacacatgatactcacaggtctgcgggtccatcgtcacctttacattctcggatgtaccgaaatggttcttgcaggcggtcaccagtgaattctcgattgcctcaagcagtgtctccttgctgatattcttctcacgttccagtatattcaatgcttctaataactcattattactactcattttattatcctcctgtttccttagtggttattagcatatattttatcaaaaatcgaatgccagacggatcagcgcgatatccggcttctcaaacgtcattttctctccgttttctgtctctattgtcacagtactttcatcatatgcagataaaataccataaaattccttttcccggttgattgcacggtaagtgcggatctcaatctcctttcccatgctccggacataatctttttctttcttgagcggtctgccaagtcccggggaacttacctcgaacacgtaggaatcttccacgaagtcctcgcggtcaagaatctcattcatctctctcgccactgcctcgcagtcgttgacggtgatcccgccctccttgtcgatgtaggctctcagataccaggttccgccttcttttacatactccacatccacgagttcaaaatgcatgcgctctaagatcggagtaatcagttcttcggtgcgcgcttcgtatgtttcacgctttgacatgtgtacaccttctttctccatattcaattttaattgtaacaaactgcccacccggcctttacacagactttacagggcataaacgtgaattgagagagggctttcgtcctctctcaatcaagtcatcgtgttatcatatattaaagtagcacttttttatgggaaatgcaagctttttctcgaaaatacaggcttttatgccggcagtttgcagacatctacccagcacaccggttttgcaagctgctccaactgcggtatcgtcagttcaatcgcgctgttgctgctcccacacgccggaaaaaccgtctcatattttttcaaagtctcgtccagatacacccgcacgccttccttgattccaaacgggcagacgcctccgatcgcatgtccgatccgttcctccacctcatccggcgcaagcatcttcgccttcgcacggaaaaatgccttgtattttgcattgtcaatccgggcatctcccgcacacacgatcagcaccgcctctccgtccaccagaaaagacaaagtctttgcaatccgccctgcttccgtgtgcagtgcttccgccgccagttccaccgttgccgaggagacggggaactcccggatctgatcttccatcttatattcttttaaatatgcctttgccctctccagcgacatcgcacaaacctctctttctgcgtcaggaagtatcgtttctgcttttactttcctgcactttaccacgttactctatcgcaatccatcatactccttttttcacgaattgtacagaattttcagctttttaaaaaaatttcaaaaaaggggttgcttttttttgaaagcctgttataatagcatttgttcggttccttggtcaagcggttaagacgtcgccctctcacggcgaaaacaggggttcgattcccctaggaactgctcaatttcataatatatttggtataccgtatggttccttggtcaagcggttaagacgtcgccctctcacggcgaaaacaggggttcgattcccctaggaactgctactgttagtaataacagcccaacccgaagaagaaagcgtttacgctttctttttttatttccagaaaacggagttgtcatgctttgcatcttaccgggatacgttttatgacaagaaaaagggactatcgcgttccagatgcaaccggaggcggcaagtttaatcgcaaaatccggtatttctaaccatgccgcgtcggacatcccggatgatctgtgtttttccaagtttgggacattccacaaggtgtgttcgtaatccgcagacaattttaggacttttgtgtgtgccccttgctggcaccactgaacaaaacataaccgcgcgaagccgatgtctgagttgccatctgccttattttcaatagcagatagcagcgagtttcggttcgcgcggttttatattgtctgtgaagcggtgccactaggggcaccagaaagtccgctcattgtctgcggatttaccggacacaccttgtgactgtccaaacgtggaaagacacagaattcgatgtccgacgcggcatggaagaaatattcggattttcctccaaaaacttgccgccccggttgcattctggaactacatattctcgagtattctcatcacaaaacgtatcccattcaatatcgtgtggcagccccgtccgctgcttcacatcttaatcttcatatccgttcggattgttcttctgccatctccaggaatcctcacacatctcacggataccatactgtgcctcccagccaagctcgttctttgccttggacggatcacagtagcaggttgcaatatcgcccggtcttctcgccttgattacataaggaatcttcacacctgttgcagcctcaaaattcttcacgatgtcaagcacgctgtagccgtgtccggtacccagattgtagatgcagagtcccgctttctcctcaatcttcttgagtgccttcacatgtccgatggcaagatcgaccacatggatgtaatctctcacgccggtaccgtccggtgtgtcataatcgttgccgaatacaccgagttcttttaactttccgacagccacctgtgttacatacggcatgaggttgttcgggataccgttcggattctctcccatcgtgccgctcttgtgtgcaccgatcgggttaaagtagcgaagcagaatcacattccactccggatctgccttctggatgtcggtcaggatctgctctaacatggactttgtccatccgtacggattggtgcactgacccttcgggcagttctccgtgatcgggatctctgccggatcgccgtatactgtcgctgaggaggagaaaatgatattcttgcagccgttctgacgcatcacatccaccagtgtcagcgtacctgcaatgttattgttgtaatactcccaaggctttgccacggactcgcccactgcctttaatcccgcaaaatggatacagcagtcgatcttgtgctccgcaaagattttgttcaggatatcacggtctaagatatcccctttataaaaggttaccggctttcctgtcagcgcctccacacgctgtaaggacttctcggaggcattgcttaaattatccagcactaccacgtcatatccggcattctgtaattctacgcatgtatggctgccgatatatccggctccgcctgttactaaaatcgtcataatgattccacctttccccgttatgattcattgttccatctgccttacgaaaattatattactctatcctccgtaaaatgtatagcccaaaatgtatgaaatatatgtaataatgttgcttttcggcttttctgtttttataatggacttatacgataaggattttactgtcagaaagacaaggagtgtgttctatgccgcatcattacaaaaattcctacaaagtgaccgaaaaagaactggtttccctctccgtctacaacgtcggcttccagaaatgtgacgccctctaccaatggggtcccggtatccgcgatcactatctgatccactatatcatttccggaaaaggcacctaccgcgtcgccggtcagacttaccatctgtccggcggagatacttttttggtctacccgaacaccgaggttgtctactgcgcggatgagcagaacccctgggagtatgcctgggtcggttttaccggaagcgacgcctccatgatcctgaaggccacggacttctcccctgagaatccttttatacgggacaccccacgcggcaatgatattcaccggcagattctgcacatctacgatgcacgcggcaacgaattcgagcacgcggtggagatgacaggacgtctctataccatgctcgccctgttcatgcacggtgctacgcacgccggcagccagaattccgcgaacagctatgtacaaaaaagcattgagtacatctcctcaaattattcctacgccatcaccgtggaggatattgctggctatgtcggcgtaagccgcagtcatctgttccgctcgtttgaggctgtcctagggcgctcccccaaggaatacctgacggatttccgcatgaagcaggcgtgctatctgctggagcactccagcctgtcgatcaccgcgatcgcaaactcgctggggtttgacaacagtctctatttttccaaaacctttcaccggcagaaaggcatgtcgcccaaagaataccgggaaaagaaccgctcgtaatcactcgcttttgcagccgtccaacagttccaccgcctctctgccaagcaccgcgcgggtaaagtcatggacgtcttttagttttctgggaaagaccataccgccgccgatcatatgcgtggtgtgctggtctgatcccgctgtaaatggcagattgtgctcttttccataggtcagagcccgctcgttaaacagcgggttcttgtggcagtcgctcgccctgctcgaatgcatggcattgacgccctccaccgcatccacatattccggaaacagccggatttcgggaatgtaatcctcctcccggaacggatgcgcatggcttataatgccgccgccctcatgtaccagcgcgtactgttcttcgatcgatgcatccttaatctgcggatgcgcaagcagccatgcccgatccagtccgtataccaaaaactccgtcccctcataacatgcttcccatcccaggaataccgtaagcccgatgcggtccccctctgcctttgcatgctcatatccgagacagaagcgccgtacccactcctcccacggcagggaacggtccaccgaagtatttccgtaaaaaaagtgatccgttacaataatgccggtgtagcccgccgccttgtaggcgcgtgccatctgagtgcccgtgctgccggcgcatgcgcttgcctccgatgtatgcatatgtgtctcatacacgtatctttgtgtctccatcttcatgctgctccttctattcttcctcatatcggttcattcccggtatctcaaccgcagacagttcctcaattgctatgacggttccatcttccatccaaagcatcttttcgtattcgtctatcttcttcaccactccggaaactgtcacataggcaccgcccgcttttttcgcgtccggacaaaaataggtcatcgtcacccgctctctcgcatccgggtgctcccgcagccagacaagctgctcatttagctcctccttgcggctctcggaaagttctatgcgctccgtcgtgaggcgtgccgtctcgcggatcgcgtcctcgtgtccgctcaacgcagcaaacggagagaactgcgccgcccggtcccacagggacatcggcggatgcatgcgcgatctgtgatgcacaagcatccggatatcgtcatatttgtgttcctctgccgcatgttcccagcccattatgccttatgccctccaatctggctgttccgctccatcgcggtcgcgccctcctgcagattcatgcccttaagcatcgcgtttttcccgtactttttcttcacggaaagcattgccttctgcaggctgcgctcctttttcagccgcagttcttcctgttttttctcttcttcctgtccgcctgtatctgtaaaaagctccagttgttcgtattgttcttccgcctcggcgcgggcttcttccaccagccggttgcccacaagcgtgattctccgcacgagaagctttggattcacaatgtcgtcatacagccccatcaccgtctccatgatcttacgggaagaggaagttctggttttcaggttgaccgtaccgtgcgcatgcttgggaatctttctcccgtagcggtccgccacaatctctccgcgatagtctgcataaagtgccggatttgtaatattttcaatgtcatagccgacggtaagcacaagctgatccgtcacaagacgccgttccaccagatccagcgccagcgcatccgccatctcctgcaccaccagccgcgcgcccttcgcgtcgtaggggcaatgcagtacctgccccgaacttatgctgttcacctgcggtctgtacgccttaatctgttccatcgttaccggctcccagccccatgcatgatcgatgagtagctccgcattgatgccgaacagccggtataacaattcctcgttgtggaactctctggctcctcccagcgagcagcgcgcaatgtctcccatcgtatacagaccgttctcctccagcttcttctggtagccccgtcctacccgccagaaatccgtcaacggacggtaattccagagcagtctgcggtaactcatctcgtccagttttgcaatgcgcacaccattccgatccggctttacatgttttgccacaatatcgagcgccactttgcacagatagagattggttccgatcccggcggttgccgtgatgcccgtctcagcaaagacatcctgtatcattttcgccgcaagttctctcgctgtcatgtggtatgtccccagataatgcgtgacatccataaacacctcgtcgatagaatagacatgaatatcctccggcgccacataacgcagatagagattgtaaattctggtgctgtaatccatgtagagcgccatgcgcggcggtgcgatctgataggtcagccgctctttcggatgccccgcattcacttcttttactttctgtacgacctcaaagagcctcgctcttcccggaatgccataggctttcagggaaggcgataccgccagacagattgtcttttccgtgcgctcggggtctgccaccacaaggttggtcgtaagcggatccagcccacgttccacgcactctaccgatgcatagaaagactttaaatcaattgcaatatacacgtgtgcttcgtccatctgcgccctcctttttttctattatagcagaaaaaaggacagagtatccaacaacttactctgtcctttggcaaaaccatcaaaaattcttctgttttgcaaaatactgcttcgtctcggctgccaccacaccgcttagcgccaccagtgcaatcagattcggcagcgccatcagtccgttaaaaatatccgcaatcgtccagactgccgacacggtcataaacggtccgatcaataccgccagaatatacagccagcgatagcattttaacaccccgggacggttgcccaccagatattccagacatttctcgctgtaataattccagccaaggatcgttgtaaatgcaaaaaacaccagacacagcatcagtaaaaacgaggagacgcgttccgggaacggaagcccgatctgaaacgctcttgtcgtgacatccaccccgtccagaccgatgttccacgtatccgtgatgatgatggacaatccggtcatcgtacagataatcagcgtatcgatcaccgttcccatcatggataccagtccctgcgccaccggctcatcggtcttcgcggtagctgcagcgatcggcgcacttccaagccccgcttcgttggagaaaatacctctcgcgattcctttctgcatcgcaacaaggattgcgccaagtgttcctcctgccgctgcacggagtccaaacgcgctttgtacgatggtggcaagtgctgccggaatctctcccaaatgcgtcagcagaatgatcagcacagtcaccacatacacaagcgccataaacggcacaaccacctgtgccacggaggaaatccgcttaatccctccgataataacgagtgccacgcacacggtcagtatcagcccggatatcacaacgctccacgaataggtgttgctaaacagatgcaccgaacatgccgtctccggatcaaaaaagccctttaccgcaccggtaattccgttgatctgcgtaaaggttccgatgccgagcagaccgactcccacgccgaagaatgcgaagatctgtcccagccagcggaattttctgcccataccgttctcaatatagtaaaacggtccgccgaccacatgtccatccgcttccaccacgcggtacttgatcgccaaaagacattccgcatacttggtcgccgtgccaaacagcgccgcaatccacatccagaacaaggcgcccggcccgcctgccacgaccgccgtcgccactcccacgatattaccggtaccgatcgttgccgacagcgccgtgcagagtgcgccgaaactcgacacttctccgtccttgccgtctttttcgtttgcaataatgtgtctgaccgcaagcggcagcttcgtgatctgaagtccccgcagacggatcgtcagaaatatgccaaccgcaaggatcagcacgatcaggggaactccccagacaaaatcatcaatgatctttagcataaccgttccattcctctccatgcaatactgcactgttgtaaagtagcatagcacgaatgtgtgcggtttggcaagggatattttcaaagctttgggaaagatcttcactggaaaatcaagaaatttatagaataaaaagcaaggaacataccgcttaaagtatattccctgcttttcaattaaatacgatactacttagaacttgccagccttgtgagcttcctctacgcttactgcaacagcaactgtagcaccaaccatcgggttgttacccattccgatcagacccatcatctcaacgtgagccggtacggaagaggaacctgcgaactgtgcatcagaatgcatacgtcccatggtatctgtcataccgtaggaagcaggacctgctgccatgttgtccgggtgaagggtacggcctgtaccaccgccggatgcaacggagaagtatttcttaccctgctcgatacattctttcttgtatgtacctgcaaccggatgctggaaacgtgtcgggttcgtagagttaccggtgatggaaacacctacgttctcgtgatgcatgattgcaacaccttcctgaacgtcatctgcaccgtagcactttacagtagcgcgaagtccgttggagtatgccttctcgtatacaacgtttaattttgccgccttgtagtcatactgtgtctcaacgaatgtaaatccattgatacgggagatgatctgtgcagcgtcttttccaagaccgtttaagataacgcgcagaggtttctgacgtactttgtttgccttctcagcgataccgattgcaccctcagcagctgcgaaagactcgtgacctgccaggaagcagaagcactcggtctcttcctctaataacatcttaccaaggttaccatgtccaagacctacttttctgtggtcagcaacagaacccgggatacagaatgcctgaagaccctcgccgattgctgcagcagcatcagcagcctttgtacatcctttcttgattgcgattgcagcacctactgtgtaagcccagcaagcgttctcaaaacagatcggctgaatcttcttcacctgatcatatacattcaagccagcatctttggtaatcttctctgcctcttcgatggagctgataccatagctgtttaatacagcgttgatctggtcaattcttctttcatatccttcaaataatgccattttcgtccgtctcctttcctactcttctctcgggtcgatgattttaacagcatctgctacgcggccgtactgtccctttgctttctcccaagcagtgttcggatcatcgccttttttgatgaagtcagtcatttttccaagagaaacgaactggtatccgataacctcgttgttctcgtcaagagcgatacctgttacatagccctcagccatctccagataacgaacgcccttctccttggttgcgtacatggtaccaacctgggaacgaagtccttttcctaaatcctcaagaccggcaccgattgcaagtccgtcatcagagaaagcactctgtgtacgaccgtaaacgatctgtaagaataactctctcattgctgtattgatggcatcacagacaaggtctgtattgagtgcctcaaggatggtcttaccctgtaatacctctgctgccatagctgcagaatgtgtcataccggagcatccgatggtctcaactaatgcctcttcgatcacaccattcttcacattcagggaaagcttgcaggcaccctgctgaggtgcacaccagcctacaccgtgtgtaaagcctgaaatatcttcaatttttttggaatgaacccacttgccttcttccggaatcggagctggttcatgttttgcgccctttgcgactgggcacatgttttcaacttccttagtgtaaatcattttaagactcctttcgcataaatagaactgagttgttaaacattgttacacatttaacatactgcatttattctctcacattttcttgattttcacaagtgggtactgcaaattttatgcacttttgtcaaaacagctgtttttcttacatttgcgtcacaggtaaaaacccttctgttccgtcctttgcgcgcacatacatccaaccgtctccgtccgaccggatgcaatagatgtcctcccctgccgcaatcgttttttctgcagatgtctcatccatcaaaaaatacacggtcagtgctcccttatgctccagcttgcacggctcgtaataggaataaagcccgccgtccgcatgctcgattttcttctccgaactgttgtaccaggcatacccctgcaggatgcagtctgccggcttgtcgtaacggatcagatccatcacaccgccctggccgttaaaaccgctaaatccggcattccggtcccggaacgggaatcctccgacctcgcccagatagtaaagatctccatcatatttgaaaaaatgggtcgccccgatgccatctgtcccttcatcaagtacggcaatctccagaccatcatcctcttccggtgttccgatgttctccacaaggtctgtcacataaaacgcatccgcaaccggcgcgtgcatctgaatgtactcggcaaggtcgtacgctgtcccgtcgatcgtgagcgtgcagatcgcctgctcccccttaccggttaccgtgtagctgacttcgttaagaactccattgtccaaaagagcgatctctgcggtctcgcctgccgaataggatttcggatatatatgttccgcttcatatgccgtctgcattgccttgatcagtttcagattcgcctgctcaatctcacttaatcccgcatcgcctgcagtcgctccccaggcgggcgtataccagctgcacgcgtcaaaatgcgcctgcaggtaagcatcatcaaaggtttttccatgtctggcataaatctcgtttgccgccagatagagctcctgctctgacagatccgacagattctcctccgtcaccggcagtattgccccaaccggaacgacatactgatcggcatcgtaatgaacatcatccgcatcgatcttcacacttgatgcgatggccacgacctcctccatcatggatccgtactcttccacgattgcctgatcctccgtgtcgcacgcaacatccgtcggctgcatcaggtaatacagcgttccatcctccgtgtaggcgatcaggttctctcctgcaccgtaattcatccatgcgtcacttttttcaaaggaacacagatagccgagtccttccatcttctcataggaagccgtctgatagatggtaaatccattctcatcctctttgatcgtacagcggtctgcccagtcttccggaagcatcactgtaatgtcgttccatgtataatcttcaccgttctccacaggtgagctgtcctttgcgccgcatcctgtcaaaaccagcattcccgcaagaaacattccctgcacccatcttctcttcattgtctctgtccctcttctgttgtcctaccgcttttccactacctcgctgcggttcttgtaaatcgaatttgccggaaccacgccgcgcacgctcgaaagcggataaacattggtgtggcttccgatgacggttcccggattcagcacggaattgcagccgacttccacatagtcgccgagcattgctccgaatttctttaaccctgtttcaattttctcatcatgatcctttaccaccaccagcgtcttatccgacttgacattggaagtgatcgagccggcacccatatgggatttgtaaccgagaatcgaatctcccacgtaattgtaatgcggaacctgcacggaattaaaaatcacaacatttttcaattctgttgaattgcccaccacggagccttttcctacgatggcattccccctgatgaaagcgcagtgtctgatttccgcatcctcatcaataattaaaggtccatttaagaaagcagtcggtgcaaccgtcgcactcttcgccacccagatattctcgccgcgctgctcatagacctccgggtcaagcgtcggtcccagcttctttataaagtcgctgattttcggcagagcctcccacggataggtcagtcccgcaaacagttccgccgcaatcgtctcccctaagtcatataactggctgatttttgctgtttccatcacacaaattcctctctattccctgtaatttttattgacataagcctggatctcttcgctgtcctccggcatacggcatccgacaatgaactcaccatcattatccgtactgcggatgatatgtccgtccagcgtccgtgcctcctccagcgggaagtccgggatttccagcaaaatatcctgcccgatcgcatttgcgaaatcctcctgatgtgcgctgaatgcgaaaccgcctgcgctgatattgatcatcctgccgttgtaagctttgccggattttttcagcgtcacggtacatgcattggcaaccggcatacgcggatactttctgcggttgatgaccttcgggtttgtcgacacagcaatccggtagctgtcggcacccgcattggaagcggcggatacgctgacatcctcccatgtatacattgcattgttgacacagatctgcagttcatatgtaatgtcttttttctttatctcaatcgtttttccggcttccggcttgatctttaccagaactccgtcgctctggctctcaaacacttccccgtggaactccgtcccggctgcctgtgctccgttcttagcgactaacaccacgcgcattcccggctgtgcatcgccaattcccatgaatccgccgctaccgagttcttccatgagctttcctaccacactctcaatcttatccacattgacggaagactcctcgtatttgctgagcatcgtgcgggacgcttcgtcggactggttgatgcactccgtcatgacctccatggtatcgcagatctgcttcatgttctccaccatgtcgctgttggaagcttccacttccttcatggcgccgtcaattaccccgatattctgtcccagctttttggaatcatcggtaatgcttgtgacactctcctgcacctgcgtgagcttctctcttgtcatgcggatcatctcaagcgtcttggtgatggatttcgtcatcttctccgaagtctcctccagatgatccagtgcgtccctgatacgtccggaagaagtcttggttcccatgctcagatcctgtatctgacctgccaccacggcaaagccctttccggcttccccggctctcgccgcctcaatcgaagcgttcagtgccagaaggttcgtctggaacgtgatcccctctatggtgcccgtctcttcctttaccatatcaaattcctgcttaaagttctcgagcacctgctcgacctcgccggagagcgccgccatggtatccgtcgtattcatgacatccgcaagttcttccgcactcacatccgcatgctcgaccgactcctggatcagcgtcaccatctcatcgatcagtcccgccacattctgcacctgcgtgctgatgtcggtactccggtccatggaggacatcgtcttattgtggagaacatcgttgttccgggtgagttcctccatactgcttacgacggaatccgctccctgccggttctcatccgccagctcacgcacaaccgtaacgccgtccacaatcgagttgctcgctccctttacctgtcccaccgtcgtcacgacccggctcagattatcccggatcgatgccaccagcgctccgtcggattcatttaagtggtcgacagaaacaacatagcagatatagcacagaagcagcgttgaaaactgcaggtaatagtctgtcattttcacattcggattcaggccgaggaagacatggagcagtgcactgagcacaatgacgatctcgtttgtgaccgcgcaccgtatcatatagctacgatccttgaacagaatcagcatactcgtcaacggcagaatatatgcataggcggtcgccgagtccgtgatacacaccacgtaggcatagaaaaagccatatccgagagccaggacatccttataatacggtgtcgctctcccctttaacttcaacgtcagcagtccgattgcaaacggcacccacgccataaccagaaaaacaacatactgcgtcgccgtatagattcccttggaaaggtcgcttccgtatgacagtgtcataatcgcaatcaaagccagccatactttcattgcctttaaattggctttctctttaaaggcctgctcattgtactccatgccctgtttcctcctgtgtcttctgccggattctatcaataactactcaaattttaatgacattttatccggctgtcaatagcaagcatgcaccgcacgccatccgatttttgcttcctttccccattcgtttctcatccaggaaattcatccagaaaattggatgcagccgcctgctgttttgcctcttcctcctcgtaagccgcatactccttcgccatcgcatcataaaacggaggcacgtcctccccaatgtactgtgcgccgtcctcttccggcagcggctgcggctgtgcattttcttctaattcctcgtagaacatgcgctccccgcccttgccgccggaagcaccctcacgcgttgtgccgggattgtcaaaatcaaacacaatgcggtcatcctccagctttaggcaggtatcaaacgtgttgccggcttttgacacaaacccggtcactttatctttggttttccctgtctctaacagttcgcgcatgacctcctcggtcagcgccaccttcgccaccgtgtgggagaccttaaaaccgcactcacactcgtaataccactggctcttctttaacattttcccgcatttcgggcaggcaagtgttgtctcaacaggctttggcttctccggaaaatcaaatgcgatctgcccttccggcgtcagtttcagcggtgcgtcgaacttcatgccggtcttcgccacaaatcccttgatcacgtccgtcttcccgcggagcaaaagttcctttacctgtgcttcctttaatgagacacccgcgatcttgccgattgcgaaccggcagctgtccggattctcctttgaatagttggcacagccgtatccaaacatcgtctttacgatatctccgccgcagaccggacattttacatcctttaccttcggcgcttccagatccgtaaaatcaaacttcagccccgtgacctttcccttctcatcctttgccagtgcgacgcgcgcatcaaatttcttcccgctcttcgacttaaagccgcggatcgttccggttcttccgttggtcagaagctcctttacattcgcctccgtcagtgccttctccgccatcttcccgacagagaaccggcagctgttcggatcgtccttcacataattggcacagccaaagccgaacggcgtcgccacgatatcaccgccgcagatcgggcacaccacatccttgatctttttggcttcgacatgttcaaaatcaaatctcaattcaatttttccgtcttccgtgtgtcccagagcgacacaggcgtcaaacttcttcccgctcttcgacttgaatccgcggattgttccggttctcccctggtttaaaagctccttcacctgcgctgcgtttaagtcctttcccgccatcgtaccgatcgcgaaccggcagctgtccgggtcatcctgcctgtaattcgcgcagccgaacccgaacgacgtctccacaatcgccccgccgcagatcggacacacgacatcgggaacaacggcggcatcgttctgtgaaaaatcaaatgcaatattctttcttccgtcctccgtctgctccagctttaagcaggcattgaacttctttttattcctggcagtaaagccgcggatcagaccggtctttccggtcgtaagaagctccgtcagatcatcaacgcccagcgcctttcccgcgatctttcccacggaaaaataacattcatcgggatgctcgtggtgcttgacgcagctatagccaaacggcgtgatctccacggcagaaccgcacaccggacatacgacaccctccaggatttccggctggttctttgaaaaatcaaatccaaccgaaacttttccctcatcatccttttccaggatgaggctcgccgagaactttttcttcgacttcgagacaaacccggacagcacgccggtatgtccttcggtcaaaagctcctttacttcctcatcgtttaagtctcttccggcgattgtaccgatggagaagcggcatccgccgccatctttctgataattgctgcacccgtaaccgaacggcgtcgtctcgatcgttcctccgcacaccggacagggaatgccgaggctacgcttcgccgcaagcccctttccgccctttccgacgagcgggtggatccgcgtggcaatctggccggtcagatcctgctcgatcatggcgaccgtctccctgcggataaaatcctccagttttgagcggtaatcctccatcacgaccgttccccgcgtgattccgtccagtcccttttcccaggaagctgtcatcttggggttgagcagtgccggaaccgtcatcgaaaccacctcaaagatcatttcccccagccgctccggcgtgagaacctgcgtctttttgttcagattcagatagccgacccgaaccagctttttgatgatctctgcccgcgtggcagatgtaccgattccggaacccttgatctgctctcttaattcttcctcctcgatgagctgtccggcattctccatggcgagcaccatcgatccagacgtgtaacgcttcggcggggaggtcttcccctcacggatggcatagccgtccgaaaaaagcgtctctcccttttgaagcttgtcggcatacgccaaaagcccggcgttctcctcttcttcctgtgcagcctcagcatcaccgccctgcgtctgctcctccccgtccatcttcgccgcattccgctccttcgccgatttcggaatgcctgcaatctccagatagcccggaacctttaactgcttcgcggaagtgtaaagcttctcaccgcctgccgcaacgacaagcttcaccgtctgatactccgccggcggataaaaaatgcttaagaaacggcgcacaatcatctcatagacgcttcgttcaagactgtttaaagattccagctctgtgagctgtccggtcggaatgatcgcatagtggtcggtaatcttggaatcatccgtatactgcgtgttcgcaatgttccgatagcgcccttccttcatgatgcgctccacaaaaggagccaccggcgcaaaatttttcagtctgctgatattttttgtaatctcttttgccaccgccgaggagagcacacgtgcatccgttctcggataggtggtaagcttcttctcatacagatcctgcgccacctgcagcgtctcatccggactgatcttaaaacgcttggaacactccgcctgcagctccgcaagattgaaaagcagcggcgcacgctttttctgcgtccctgtctccacggaatcaatgagcgcttcctgtccctttaactccgcaatcagcgtctgcgcgctctcttcctttttaaagccgttttccttatataaaagcggcgactcaaaatatttagagccttctattgccttccactccgccgtgatccggcattcttcctctccttcgggatgaaaggttcccacgacacggtaaaatggcgtctctgtaaaattgcggatctcgcgctcccggatcacaaccatgccaagaacgcaggtcatgacgcggccgaccgcgatcgccgtatagctcgatgttcccgccgcatcattcagaagctttccgtactttaccgacatggctctggaaaaattgattcccatcgcataatcctcgatcgtccgcatcacgcccgactttgcgagattgtcatactccgacatgtcttttgcctcacggatgccgcgcagaatctcctcctcggtctgcgaatcgatccagacgcggagctccttcatgccctcgcgcacgccgccgaacttccggatattttcctcgatcgtctgtccttcttttccggcatctcctgcccagtagaccgtgtcaatatcctcgcggtgcagcattttatgtaccacatcatactgcctgctcacagatgggatcacattatatttgtaatcccgcggcagaaacggcaggtcttccagccgccattttttataccgctcatcatactcctccgggtacaccatctccaccagatgccccacgcaccaggtgatgacatacccgtcgttctctatataaccgtcatttcttccggatacgccgagaatccgcgcgaactcctgcgcaacactcggtttctccgtgatgatcaaagattttgccacaatctgttcctccaattactttcgcatgaagcaaattatagcatttttccaggcatcgggcaacttacagttcattcatatccacgagcacgaaccgcttatcccgctccgccatggcggtaacctccggtgcaaatccctgtgcggaaaagaggaaataatattccgcgccgatttttgcccgcttcatgttaaggaacagtgcctcgcacatctccatcgtaagctcgggctcctgccagttgcagagtccgaccatattctggcggatctcattctgtgcaatgatgtcgatattcccctccttgccgacccaggttcccatgcgtgcaatcttaagcgggagctttcccaccataccgagaagtcccagatattccatgcatacctccacaaaataccgggagaggtacgcatccagtctgggcgcgatatatctgtcgtagaattcttccgggcggatcatatacagatccgacagatgcggatagataaagtgaaaccagaaattcacataattgtcgcggatccggtacacacctttcttcgtgttctcccagccgcccgtctcaaacgataccaccttctggatgatatcaaatgcagccagattcttcatatagacgctgatcttggcgcgtgagaatccggtcgtccggtacagatcattcagcttgtcctgcccggccgcgatctgcgccaggatggtctcatagacagacagttcccgcagactctccccgatcagatcttccgccgcatggtacagatagccgcccggcgaaagaatcagtctacagatattggtctttacatccgcttttgcgttccagcggttgatatatcccggcacaccgccgatgatgccgtaagtcttgatacattccgccaccggatactcgggcagcgcccgcaccacctccagaaaattcagattcgtaaatttgattttccggtctattttgcggcatgccgcctcaccgatacactccgtcagttcccgctctgcccatgacaccgccgagctgcagagcagaatcatcacaggtcccggataaagcctgtgcgctttcagtttcagcaccgcctccataaaagtaggatcctttttggcaatatactgaaattcatcgatcacgactaccagcttcgtgggatcaccgctctttacccggttaaaatattcctcataggtatacttctgcggcgtcacctcaaactgcgccgccagttcacgccccatctgtgcgcgctgctctcgctccgccacctgtctcgcgcggtaataaaaatgcttcttgttctgcacaaatgcgccaagcagccgctctttctccgagtccgtccgcccgtacagcacaaccagctgattgcccggttcccggtagcactcttccagttcctttaacaccgacgattttacgaccatctcttctcctctgcactttcctgccgggcacgaaaagccacaccgcatcccatatccggcacattctatctgtccatatgttctgcggaaattatatcattttttaattttccgggcaataaaaaagaatctcgcttgcgaaattctccgcgcgcaagcggttcgcaaagcgatattttccttaccgcgagctgcgcatcctcgcggagcgttttttattttcatagggaagttccactttcacacattaacgtatcacgctatttcctatgaaataaaaaagaatcctgcaagcaggattcttttttattctttatttcgctgtgatgtatccctgtgctttcaaaagctctgcgcagagcactgcaccgcccgcggcgccgcgcacggtattgtgggacagtcccacgaacttccagtcatagaccgtgtcctctctcagacgtcctaccgagatacccataccgttctcatagttgacatccagagcaatctgcgggcggttatcctcctcgagatactggataaaatgctccggtgcgctcggaagctttaactcctgcggaacaccgctgaaattgcgaagtgcctcgatcagctgctcttttgtcgggttcttcttaaactttacgaacaccgccgcagtgtgaccgtttaacaccggcacacggatgcactggcaggtaatgaccggggatttggccggaacgatcgccttcttctccgggtccacatgtccccagatacgaagcggctccttctccgacttctcctcctcaccgccgatatacggaataatatttccaaccatctccggccagtccttaaaggtcttgcctgctccggaaatggcctgataggttgttgccaccacctcatacggctcaaattccttccacgcagtaagtaccggcgcgtaagactgaatggagcagttcggctttacagccacgaaaccgcgctttgtgccaagacgctccttctggtatttgatgacctccatatgctccgggttgacctccggaaccaccatcggcacatccggtgtccagcgatgcgcgctgttattggaaacgaccggagtttctgtcttcgcatactcctcctcgatcttcttaatctcttcctttgtcatgtccactgcggaaaatacgaaatcgacctctgccgcaaccttctccacttcgttgacattcataacgacaatctttttcactgcttccggcatcggtgtgtccatcttccagcggtctccgactgcctcctcataagtcttgccggcacttctcgggctcgctgcgatcgttgtcacttcaaaccacggatgattctccagcagagaaataaatctctgaccaaccatacctgtaccacccagaataccaactctcaacttttcactcatgactcttctaatctcctcatctttttcttatgacacccgctgtggcatacgactccgcctctcattgcctctgccggatcattacacgtacctgctttttgcgctgttcgtgtccgtcagtgacgaacaagtgtcgtcatagtgaatatattatgccatttcccgtcaaaaagcaatgcttttttcgtaaaacttcccggttttttttgacagttcttgtacatttctcacaatatcacgttactgtattgaagtttcaagaggcttccactcttcctccaggtacttcttctccgctgcgatcacctgttccatcgcctcttttcccggtgctccgaccgtcagacgcttgttcacacaggtttccatggagatcgcctcatagacatcatcctcaaacaccggactgattgcctttaactcctccaggctcatatcatcgatcgcaattcccttttcgatgcagtaaagcacgatctgtcccacaattccatgtgcatcgcggaacggcaccccgtggttcacgagatagtcggcggcatccgtcgcattggtaaagcctccgttcgctgaagcacgcatgcgctccttgttgaacttcatcgtggcgagcatgccgttaaacagcgcgatacagcctttgaccgtgtccatcgcgtcaaaggaaagctccttgtcctcctgcatgtccttattgtacgcaagcgggattcccttcatcgtcgtgagaagcgacatcagcgcgccgtagacgcgtccggtctttcctctgactaattctgcgatgtccgggttctttttctgcggcatgatgctgcttccggtactgtacgcatcatcaatctccacaaactggtattcgttggaattccagataatgacctcctccgagaagcgcgacagatgcatcatgatcgtggcgcaggcggacagaaattcgatcagataatcgcggtcagacacgccgtccatgctgtttaaagtcggtccgtaaaaaccgagcagctctgccgtgtatgcacggtcaagcggataggtggtgcctgcgagcgctccggaaccaagcggacagtaattcatccgctcgtagatgtcatgcaggcgcaggcggtctctcttaaacatctcaaaataagcccccatgtgatgcgcgagcgtgatcggctgtgccttctgcagatgggtgaaacccggcataatcgtctccgtattctgctccatgatatgtaatatcgtgccgagcagttcctttaagagcacatccacgtggagcagttcctctctggtgtagagacgcatatcgagcgccacctggtcgttgcggctgcgcccggtatgcagcttctttccggtgtctcccagacggtcgatcagattcgcctccacaaagctgtgaatatcctcatattcatccgttatgacaagacgtccggcttccacatccgcaaggatttcctttaagcatgcgacgatcgcctgcatctcctccccggttaagatttcctgtttcccgagcatccgcacatgtgcaatacttccctcaatgtcctgtttatagaatttctggtcaaacgaaatagacgcattaaaattatagaccagcttgtcggtctgtttggtaaaacgtcctccccataactgagccattttaaaaacctcgctttcactacatttcctatcattctacatgaagttcgcgcttcccgcaagtcctttcatgctttaccgcgtcaaattccctgtgccgccgcttttgcagcaatctgggcatcgcgctcccgcttggaaaaaacgcacccgcaataatactgccggtacattccgtattgttcggaaagctctaccgagcgcttgtagccatttttctttttgaagtcagaattcaaatatgccacgccgtattcctccgccagcgcatccccgatctcatttaatttttccgcattcttgagtggactgatggacagcgtcgtggtgaagtaatccatgccaaggctttttgccgtctccgccgcctctctcaagcgcagctcatagcaccggaagcagcgttcgccgccctccttttcctcctccagtccgcgcgccatctcataaaaacgttccttatcataggcgccctcccggaatgcgatcggatattttgccggaagttcccgaatcagccgctgctgctcctgcacccgcatatgatactcttcttccggataaatattggggttgtaataatccacggtgatatgaaaatactgcgacagatactcgaggcagtacgagctgcacggcgcgcagcagctgtgcagcagcagcgtcggcacacggttctgctcctttaatccagcgatcgtcgcctccagcattttctgataattcttctgtgctctcatgcttccacctcctctgcaaatgcgaggatctgctccgcacggcgcttccatgtatattcccgctcaaaggtctcataggcagaagccgcaatcttctcacgaagtcttacgtctgtaagtgctctctccgcctgctcacacagcgtgtccggtttttccagcgaataaaaaagcagctccttcccgcctgtaaacgttcttcttaaatacggattttcatcggttaacaccaccgcatgattcgccattccggcaggaacccggtcgtgcattccccggttaaaaatcggtgagacatttaaaagcacatgggctttggcaatcctctcaaaggagagcgcaaacggcaccgccggctcgcgccgcaggctgtgcccgtccccgcaggaatatttttcccagccttccccgaatacggtaaccggcagcttcttcgcgagcagcgcgtccaacgccgccttgcggaaataatcccgcacataggcgtccaccgcatacatgctgttcataaacagcgcaaactgtccggcaggaagttccagttcctcctccttaagatgctgtgaaaatgcttcctccatcggcagtgtgggatcggcaagcctccgctcaatcagatctttcatcatgctcccaagcggctcgggagcattctctacaatctgataaaccgcgtccggtctgtcatacgttcccggaaataaaatccggcactccggctcttttgtgccctcgtagactgctcttgtcgccccgagcggcagcatgtggacgctcgccaccttttcataatatttttctacgtacttctgctgtgcctcgtcgaggacaatcgcatgcaggtttttcacaccgcttgaaagtccctgatagtgaaacagcgggtgatctaaaatatagtcaaaaaacggtcccgcaaggcggtccacatagggagtgccgtcgtctaacaccatccgcggcagaagggaattaaaatccagaatcaggcggtacggctgtccgatatagcgcgcaagcttcgcatccagatcatcctcctttgagagttcgcacaccgtcacctcatatcccagttcctcaaacgccgcgccgatctgatttgcgaaaaagttgctggacagatagcagatttccctggaactgaataccagaatttttcccttctgcttcctttcctgcatcatgacacacctccaagtgcaaacatgctccggcagatccattttccggtctccgtcgcaaaaatcctctgatatgccgtctctacagccgctttatccggcataaacccgccgtctccgtccggtctgccgtcctcgtacaaattcaccagaaaatccgcctccaccagaatctgatagtctctgccctctatgccggtgtaggtgtggtgatgtccgatcagatagcagacgcgctcaatcacatcctttgcaaagcccagccgcatcagcatcccgcgtgccaccgcaggaccttcctgctcctgcagctttcccgcactgctcccgtacttctcctccgccggcttgatgccgatatcgtgcgtgtatgcagccgcttccagaatatagagttcctccggcgaaagctgctcgcgctctccgatcagctttgcatagctgtgtacctttgtaaaatgctggatccgtttcgggtctccgctgtaatatgagatcatttccaaaaaaagtttttctaacatctttttctcctttgacagaaagaagacctttaccaagcatccgcttcataaaggtcttatcattacgctcttgcttcccgcagtgtcagtatcgcaaacacatagatcaaaatacacaacaggcagaataccactctgccgcagattgccccggcgaccagctgtactgcagcgactaccgcatgcacccacaccggtacctcctgcaggcaggcagcaatcgccacctcgatcaaaacgatcacgcacaccggcaccaccggaatcttcattgctaaaacggcgatcagaatcgtcgcaagcgccgcaaccacctctgcaaataaaatcagcatcttcttattatcacgatttgcaatctctcccatacaaatgaactcctttattatctttctattctgtctgcaagccttcacccgcatgcgctcattatagcaaggatcgaaaaaaagaacaagtccactggaaaaataccttcacttccgctataataacgcaggaatatactcttatattccttgccaataaataatcagaaaagagaacaaacttatgaatgatacaaaatgggtctccatgtggggcaatgccatgtccatcgcagaacaccatccggagggctacgcaaaagatctgacgctccgctatccggtctatgcaccattttccggaagcgcactccgcttcacgctcgacaactactgcggaaaggaacctgtcaccatccaccgggcaacggtggcggtgtgtgattccgatctcaccgggaaagttccgctttcctgtccgcttgctgcaggcaccatccgggatattacctttgacggcagccactccgtcacactggcagcgggcgcgtccgccacaagcgacgcactctcctttccggtatctgccggtcagacgctctgcgtcagcctgtattttgacggctacactgccatgcagtccgccgtgctgatcacaggtccattgtcccgcggctatttttcctacggcgaccagacgcacagcgaagcgctgccccttgccacctccaaggcgacaaactggttctattttcttagcaacatcgatattctgacaaaggaagattgtcatgccattatctgctacggagattccatcaccgcacaggcatggccggactatctgacgctgcgcctcatcgaagaagggcacaaccatacctcggtaatccgccgtgcggcaagcggtacgcgtattctgcgccagtacgactgtatcacctacgactcctacggtcttaagggaaccaaccgttttgcccacgaaatcccaaccgccggtgcggataccgtcatcatccagcagggcatcaacgatatcatccatccggtcggaaccgacgtcaatccgttccgtcccatgagtgatctgccgactgccgccgaactgatcgacggtctgaaatggtatatcgaggaggccagaaagcttcacgacagcgtctatctcggaacccttctgccgatttacggctggcgcacctacgcaccgttccgtgaaaagctgcgcggtgccgtcaatgactggatccgctccaaccacgagagcgacggctgtatcgatttcgatcaggcacttcgtgccgcagatgatccgcgctctttcgcaaaaggctatgacagcggcgatcatctgcatccgagcaatcctgcatacaaaaaaatggcagacacagtgcctgccactttattgcgctaattatttattctttaaatgtttgcgtacgcgttcaatcagcatgtcaagcgccacgatattttctcccccttccgggatgataatatccgcccggcgcttgctcggttctacaaactgctcgtgcatcggctttaccgttgtcagatactggttaatcacgctgtctaacgaacgtccgcgttcctttacatcacggatgatccgccgcagaatccgcacatccgcatctgtgtccacaaataccttgatatccataagatcacagagactcggctcagcaaaaatgagaatgccctccagcacaatcaccggcgcaggttttaccagaatggtctcctcggaacgattatgtatcgagtagtcatagaccggcatataaatctgctctcccgctttcagcttacagatatgttcacacaacagtgctgtatcaaacgcatccggatgatcatagtttaacttcgaccgttcctcataacacatgtcgtcatggcgtttatagtagttatcatgacgcagaatactcacctcatcatcgccaaagctgtcgatcagtttgtcggcaagtgttgtcttgccgcttccggtgcctcctgcaattccaatcaaaattgtattcatcctaccgctcctgattactatttcccaatgatagcaagtgtagcgctcgttccaaggcggcttgctccggcatcgatcatcgcctgtgcttcctctgccgtgtgaattccgccggatgctttcacacccatatcatcgcccacagtttttctcatcagtgcgacatcttccgcctttgcccctccggtggaaaatccggtggaagtctttacgaaatcagctcctgcttcttttgccagctcacatgccttcaccttttcctcgtctgtcaaaagacaggtctcgatgatgacctttaagacaatatcgctgccacagacttcctttaaggtatgaatatcattttttacatagtcatacttcttgtctttcaatgcgccgacattgattaccatatcgatctcctgcgcgccgtcctcgatggcagccttcgtctcgaatgccttcacaccggtgtcagacattcccagaggaaaacctaccactgtgcacaccttcacgtcagagccttttaacttctctgccacaaaacgggtgtaatactgattcacgcacacggatgcgaaatcattggcaagcgcctcgtcacagatctttgccacctgtgcctccgtcgcctctgcctttaaaatagtatggtcaaaatatttgcttgaaatcatgatcttagaatcctttctgtttgttatcatatgctcccggacgcttccggaaattccggtctcttacgccgtcttcctatctggcacccttatcatacggaataccctccgctttcggtgcctgggaattcttggatgtaaacgcaagaataatcatggatgcgataaacggcatcatgctgtagatattcttggacaatccgaggtttgcaagcacggtggaatccgcgatgttcgccagggaacggaataccgcaaagaacacggctgcgcccgcaatgttgaacggcttccactgtccgaaaatcataactgccagggcgaggaaaccggctcccgctacgccgacctcaaagttccaggtggtaacagacggaacgatgtaggcgaaacctccgattccgccgagtgcacccgagatcatgacaccggtatatctccactgatacacattgataccgaccgaatcggctgcctgcggatgttcaccgcacgcgcgcagacgtaagccccatttggtcttgaacaaaaatacatagctgacaatcagaatgataattccgataatcaggaaaatgttgatcgtgagcggtccgattttatagataaatgccttgttgctgtaggaaagctttgcggaagccgcaccgtttcccgctgccgaggagttattgaacgcctttaccgctacgatcgccaccgctgtggcaagcatatttaacgccgttccgccgatcgtctgatccgcctttaacgtgatggcggaaaatccgagcagaagggaatagagaattcccgctaccgcacttgccaggatggacaccgccaccagcacgccggacggaagggaatccccgcagagtgccaggacgaaaacgcccgccagacctccgattgccatgataccttcaagtgcaatgttgattacaccgcttcgctccgagaacataccgccaagcgccaccagcatcaatactaccgcatagagtaatgtaaacttaatcagtaagaacattatttcacatcctccttcttcgcttttttcctgccgagcttcgatacgaccacgctcttaaagagcataacaaacgcacacaggtaaatgatgactgccacgatcagatccgcaatctccggctgataatacttggtcggaagatacgcgcctcccacggagatatgtgcgacaaagattgctgcaaataccacgccgatcggattgctcagtgccaaaagtgctaccgggataccgttgaaaccgattgccggaagcgctgtggacacctgcggattccactcggatgcaccggacagatagtaaagtcccgcaccgatacctgcaagtgcgccggagattgtcatggaaagcacaatgttgcgcttttcattgatgcccgcatattttgcggcgtctttgttaaagccacaggcttttaactcataaccgaatgtggtcttgttgagtaccacatacatgataattgcgatcgcaatcgcgataaaaatggcaatcgtggtcgagcttgtcttaaaaacagcgctcatgccgcaatccggaatcaatgactgcggtgccgcggaactcagcttgtaagtacgcgtcgtcttctggtcgtacattccggataccgtgctgtacatcagctcgttcaccagatataaaccgatccagttaaacatgatggaggtgataacctcgttgacattaaagtacgccttgaaaattcccggaacagcaccccagatggctccgcagaccattgctgccagaagacatacataccacggcatctgcagaatcagtgcaaaatacaatgcaccgaacacgcccaaggtatactgacctgccgcaccgatattaaacagtcccgtcttaaaagcaaacgcaacggaaagacctgtcatgataagcggtgtcgcctgcgcaatctcacttccgattccctttggtttgagataaaaaccacccttgataattcttgagaaaccatccaatgcattctctgcattgatacaataaagtatgataagtcccacgagaagtccgatcacaatgcaaagaagcgatgcaaagatggacaataggacatcctttgtcttttcactcattgtcatatttcctttctgttaatctgtaaggcttcgccttcatgcttcctttgcaaccttatcccgctttgcacctgccatgtaaagtccaagttcctccacggtcactttcttcggatcaagttctcctacgatctcgccctcgtacatcaccaggatacggtcggacacgtccataacctcatccagttccagcgagactaacaacacggcttttcctttgtcgcgctgtgccacaagctgcttatggatatactcgatcgcgcctacatcaaggcctctggtcggctgcactgccacaagaagctccggatccttgtcaatctctcttgcaatgatcgccttctgctggttaccaccggacatgctgcgcacgatggtcaccggtccctgaccgcttcgcacatcatactgctcgatcagcttctgcgcatatctgcgcacctcgcccgacttgataaagcctgcgcgctcaaactgcggctgccagtaacgctgcagcaccagattctgttccagtgtgtagtccagtaccagtccgtgcttatgacggtcttccggaatatggctcataccgtgcttggaacgttcccggatcgtggcatttgtgatgtcctgtcccatgaatttcacagtgccttttccgaccttctccagtccggtcagcccctgcaccagctctgtctggccgttgccgtcgatacctgcgatacatacgatctcaccgcggcgcacctgaaacgagacatcccgcacggcattgttttcatgcgatctgcttgccaccgtcagatgcgatacctcaagcaccgtatcccctggctctttctcatccttgtcaacggtgaagcttacatttctgcccaccatcatcttagagagttcttccttcgtcgtatccgcgatgtcaaccgttccaatgtactttccttttcttaagatcgtacagcggtccgccacctccatgatctcattcagcttatgcgtgatgaacagaatggatttgccctcgtgtgcgagattcttcatgatcttcatcagttcctcgatctcctgcggcgtcagcactgccgtcggctcgtcaaagatcagcacctcgttatcacggtagagcatcttaagaatctcaacacgctgctgcatgcctacggtgatatccgaaatcagcgcatccggctccaccttaagcccgtacctctcactcagctccagtaccttttttctggcaccatctttttcaaggaacaatcctttcgatggctcaacaccaaggataatattatccagcacggaaaaacactccaccagcttgaaatgctgatgaaccattccgatgttcagatcattcgcgtcgttcggcgtattgatctgtacaacctgcccgttctttttgatcgtaccggacgtcggctggtacagaccaaacagaatactcataagggtagacttccctgcaccattctcaccaagcagtgcatgaatctctccctttctcaactgcagggtaatattatcgttggctttgattcctggaaattctttcgtgatgttcaacatctcaataacatattcgttttccatatacgtatatcctcttcgttcttttttttcatgcgccgcatgagtcattcctgcatagcttatagtatcacatctgttctgcgctgctttctgcgcatctgaagttccgcaggaacttctgaatatgaactgctaaagtttattataacatcttccggatataaaaaaaagaggaagagaaactatttctcttcccctttaaagagtccgcttactctacatagtcaacggttacgtgagaacctacctccggctgattctctgtatcgttagaaacagtgatgctgccgtccttgagtccgtctaatactgtattgtactcatctaccgtaaatgttgtaaagccccaggaatctgtatccgtcggaagaccaagataatcgccctgtgccagaccgagctgctcagacttgccaccgatggaagcccagttgccgccaaagtatgcatccagtgcagagttcactgcagagcctaagcccttcatagcagaggtaatgcacagatcaccgatcttcggacgctggtcaacatcgacaccgattaccttgccgtcgtactgctctgcagcctcaacagcagatgtgtagataccgccgccgcatgcgaatacaacctgtgtgccatcctgataccagccctccatacgagctgtgatcgcatcacttccgtagaactgaccgccatagtagtatttcacatctacatcaacgcccatctcttctgctgcatcgttgataccctgaatataaccgtaaccataacggataactgccggaactgcgattccaccgaggaatccaaggcttgtgtaaccatccttaactgccgcataacctgcaaggtaacctgcctgctcctcctggaaagaacagatatatacgttgtcgctgattccgactgcgttgccggaaagatctacgatgtcagcctctgtcacatcaactgcgataaaggaaacatccggataaagatcctgctcctcagcgattgccggtccgaacagataacccggcataacgattacggttgcaccgtctgcaactgcaaggtcgattgcgttgattctctcctcgtctgtgtcctcagccggcttatagtactgatactcaataccgttcttatcaccgtaagccacacaggtctcccatgtgatctggttgaaagactcgtctgtgatgtcaccggaatcggtaatcattgcgatctttccatcagcggatactgcaggagcagctgcctctgtgctctcctctgctgcagcctctgtcgctgccggtgctgctgtctgattgttgtctgcagttgtattctcctcgctggaagaaccacagcctgcgaacatggtggttgccattgccgcagtgagcagtaagctaatcacttttttcttcataatattttcctccttttgcactcagtcataacccgctctaataaacattgataagcatgtgttataactagcatataaataaaaatctcccagcacaattactgagagtttttatttaaagccgatagtcggactcgaaccgacgacctacgcattacgaatgcgttgctctaccaactgagccatatcggcaggtcatgtttaacatcacattgagttattataacggaatttcaaaaaattgcaactactttttttcaattattaaaataaaatctttcttatgctatgaaaatactgcaaaatcagcatatcatcgatctctcgcagacatgcgggagcattctgcatatattaagaaaggactcccccgaatgagaaaaaaactgatcaatcttatgcacattgccaaatcctacggtgacaatgtcattctggacgatttgaacctctacatccgtgagaatgaattcatcacactgctcggtccgtccggctgcggcaagacaacaaccctgcgcattatcggcggatttgagacccctgacaaaggccaggttctgtttgacggaaaggatattaccgccctcccgcccaatgagcgcgatctcaatactgtattccagaaatacgccctttttccgcatatgtccatcgcggaaaatatcgctttcggacttaagatcagaaaaaaaagcaaggcatacatcgacgacaaaatcaaatacgccttaaagctcgtaaacctggacggattcgagcaccgctccatcgattctttgagcggcggccagcagcagagaattgccagcgcccgcgccatcgtcaatgagccgagggttcttctcctcgacgagccgctcggcgcactggacttaaagctccgccaggaaatgcagtatgagctgatccgcctgaaaaacgagctcggcatcacctttgtctttgttacgcacgaccaggaggaagccctcaccatgtccgacaccatcgtcgtcatgaaccagggctacatccagcagatcggcacaccggaaatgatctacaatgagccggtcaacgcgttcgtagccgattttatcggggacagcaatatcatcgacggtatcatgatgaaagaccgggtcgttgagattctcggcaccaggattccctgtgtggatgaaggattcggcaccaacacgccggtcgacgtcgtcatccgtccggagaatgtggagatcgtcgcacccggggaaggctttatggacggcgatatcacttccgtcatcttcaagggcgtccactacgagatcgagatcatggtgggcggctttgagtggctggtggacaccacgcagttttacaccgtcggaacccatgtcgggatccgcgtgattccattcaacatccagattatgaacaaaccggaatccgaggacgaggaggcagcagaaatcgatgtctaacttcaaaaaacagcttctggcaggaccttatctgatctggatgatcggatttattcttctgccgcttgtatttattctctattatgccatcactgcggcggacggcagctttaccttttccaatatcgccgccatcgccgatccggtgcatgtcaagtcgattcttctctctttaaagctcggctttctgtgcacgctgttctgccttgttttgtcctatccgctctgcatgattttaagcacattccgcttccgtcaccagagctttgtcgtctttttgttcatcctcccgatgtggatgaattttatgctgcgcattctcgcgtggagacttctgctctccaacaacggtattgtcaatgccattttagaagccgtcggcaccggccatgtgaagatgctcaacaccccgaccgccgttgtgttcggcatggtgtacgattttcttccttttatgatcctgccgatctacaactccatggtgcggatcaacaaggacgtcatcgaagccgccagggatctcggcgcgaccaatctgaccgttctcgtaaaaatcatttttccgctcaccctctccggcgtgttaagcggaatcgtcatggtctttgtgccggcactgacctcgttcgtcatctccgacctgctcggtgggggcaaggtgctcttaatcggaaacgtcattgagcaggaatttatgcagggcaccaactggcatctgggttccggactgtccgttgtgctgatgctgtttgtcattgcaagtatggcacttatgaatgtgctggataaagacgaaggaggtaccgcggtatggtaaagaaatagggacagcgcatctatcttgccgtcatctttttatttttgtatctgccgatcctcgtactcatcgtgctctcttttaacaattcaaaatcacgtgtcgtatggggcggtttgtctcgaccgtcatcggaacgcttgccgcgatcggcatcagtgccatgaaaaaaaagaaccgcatcatcatgctcggtgccaccaatattccgctgttaaacgcggatatcgtgacaggtatttccatgatgctgctgttcgtaaaatttatgaacctcggtttcgtcaccgttttaattgcacatattacgtttgatgttccctatgtgattttgaacgtgctgccgaaattaaaccagacaaaccgctacacctacgaggctgccttagatctcggtgccactccgatgtacgcgttctacaaggtgacctggccggagatcaaatccggtgtattttccggattcctgatggcggttaccatgtcgctcgacgatttttccatcacctttttaccaaaggtgccggcgtcaacaccctgtcgacgatgctctacacggagctgcgcaagggggggtgcgcccggaattgtacgccctgtcaaccattttgtttttgtttgcatttcttctgcttcttgtcatgaaccgccgttcggacagaatcgccgggaatcatgccggtatccattaaaggaggtgccacttacttatgaaacgattccattatgcactgattaccgccgcgtttgccgccctgcttctctcggcgtgcggcagcgcggataccgataccgccggcagctccggcgacaattccctcgtcgtgttaaactacggcaaatatctggattcctccgccatcaaaatgtttgagcaggaaaccggcatcaagatcaagctcgaggaatacgagagtcccgaggagatgtacacgaagttttctgccggttccatcagttacgatgtcgtgtgcacctcggattatatggtggagcggctgatccacgagggaaaagtggcgccgattgatttttcctccttctcctactataagaatcttgatcccgctattcttgctgccgccgaggtcttcgacccgcagaaccagtattccatgccgtacttttacggcacgctgggaatcctgtacaacacgaccatggtgagcgaggaggagaccgatctgcgtgacgcgctctcgcttctggtggagcagaaacccctcgtctacgcttattatgtggatgagaccgcagatgagatgatcgcggggaatgcggcgttagcgctcgtctactccggcgaggcagccaccgccatggagtccaacgccgatctctcctacacggttccgaaggagggatccaacctctggatcgattcctggttcattccggctgacagcacacacaaggaaaacgccgaaaagtttctggattttctgtgccgcgaggacgtcgccatgctcaattttgactacgtctgctacgccacgccaaatcaggccgtcgtcgatgcgcttgacgaggacacccgcaatgataccacgatctttcctcctgacgatgtctttgcgaactgcacggtctacaaacagctcggcagcgataccacagagctttacagctatctctggaaaacattaaagtccgaatagcatccgacatttttagtaatattgtccaattgctttttgactttctatatgataaattaaatccacataaatgcagctacgcattcatgtggatttttcttccccatctgtacgattttacttcccctccattcattcggaggattttatgaattaccacgatttcaagcagcagatcatctctactctctcggaccgcctcggctccgatgtccgcatcactgtttcagacattctcaaaaacaacgatacccatcttgacggactcaccattctcgcgcccggtcagaacctggcgcccaccatttatctggattactactatggacagtatgagcgcggcagatcgttttccgacatcacagacgacattctgaccgcctatcgggagaaccgtcccaaatcccctgttgacatctcttttttcaccgactatgacaaggtaaaatcccgcgtcacaatgaagctgatcaactatgagcgcaaccgcgaactgttaaagcgtgttccctactatcgctttttggatctcgccatcgtcttcttatgcctggtggaatctgattcttccggcacagcaacggtcctgatccacaatgaacatctcacttactgggggattaccagagacgacctctacgccctcgccatggcaaacacaccgcagctgctccgctatgatctgcgcagcatgaccgaagttctgcgcgagctgtttgcggatgaatttgcggatccagcgggaagcgatctcattgagccttttccgatctacgttctgtccaaccagcacaggctcaacggctcctcctgtattctctatcagcatctgctgcacgattttgcccggcgcatcggcagtgatttttatattctgccgagcagcgtccacgaagttcttctgattcccgcagacaaccagatcagtatgtccacgctctcctccatggtccgggacgtcaattcgtcccagctggccagagaagagattttgtcggatcacgtctactactactccctcgagacggaccagatcactatgtgatcctatggtctgcccacgatatcctcatacagccgcgcataagtctccgctgactttttccaggagaaatcctcccgcatcgcacgctccgcaatgccgttccagcattttctctgcgtgtaatacacgcgcatcgcatagcggaggacgcccagcatttcatgcgcattataattggcaaaggagaatcctgtgccggtctgctcgtattcattgtacggcatcaccgtatctttcagcccgcccgtctcgcgcacgatcggcacggttccatagcgaagactcatcagctgcgacagaccacacggctcaaacagcgacggcattaaaaacgcatcgcaggagccgtagatgcggtgtgcaagctcctccgagtagccgatcgtcacgtgaatcttctgcggatatttttccgcaaaatagcgcagcatctcctcgtagcgcgcctcaccggtacccgccaccacaagctgcagacgctcggtgctcatcagttcatccatcacataggcaatcaggtcaaatcccttctgatccgtcatccgggacaccattccaagtaaaaatacgtccttatccaccgggagtcccaaaagcttctgaagctttagcttattgagtcccttcccctccgtgtgattggtctcgttgtaatggttcgccagataggcatctgtctgcggatcatattccctgatatcaatgccgtttaagattccatacaggctgccttcccgggcgcgcatcagaccgtccaatccctctccgccctccggcgtcatgatctctctcgcatatgtggggctcaccgtcgtgaccgcatcggcatacaccacaccgcccttcaggtagttggcctccccgtaggactccagcttatccgaagaaaagatctgctctggcagaccggtaatatctataaccgccggcagtgagaaccttccctgaaacttcagattgtgaacggaaaagaccgtgcggatattggaataacatctctgatccccgtaaaatgtccgcaagaataccggtaccagtcccgtctgccagtcatggcagtgaatgacatccggccagaaatccagatacggcagcgcctctaacaccgctttcgagaagaatgcgaacttctccacgtcctcatagatattgtgatacggcttatctcccgcaaagtagaattcattgtccacaaaatagtatgtaatgccgttctgtaccgtttcaaagataccgacgtactgtctccgccagctgagattcacatagaaatggcagacaaaccgcagctgtgccttccacttttcatccatgcataaatactttggcatgataatgcgcacatcaaaatgcttcttatcgaaataccccggcagcgatccggtcacatccgccagaccacccgttttcataaacggcactgcttccgaagctgcaaataaaatcttcatcatgtaatcacccccaggctttttgatccctctatttattatagcgcttattgtttcttctgaaaagtgcgaatcttaccatgcgccgcagccgcgcggcaggcaccataatagctctgcgcgccggtctgagccatagccacaccacacttaacatccggtatcccggattccccacatccatatagcgtccgtctcttaccctaccggtcattttccccttgacctgctcccgccgcacgggtccctcgatggctgtctggtgatcccccagcagatacagtccgtcctgcccgatcttataaatccggtgcagtaccagcattccattctccctacggtagagcacaacgtccccgcgccgcagcgcgctcccatcctctatgccggcaagtaccacctcgtccctccgcggatctataaacggatacatgctgtacccctgtggatgaatctgtatgcatgctcccgccttaaggagcggctcaatctcatagatctgctccattcttcccctcccgtttctcttcattcattgtagcattttttacctctgaatgctataataagcatacttatgaaccgctaataaaggagtgacaccggtatgaaactcaacgatcgatacatcaaggcaacgctcgcaggtattccctatctgcttccttacggacagctcatcgcagatcccgctcctgccacccggctcaacgattccggggcacttctgtgggacggcatcttagagggcgatagccgcgaggaactgctcgcccttctcgcagaccgttaccatgccacagagcgcgagcgcgcggcacttgcggaagatgtcgaccagtatcttcattccctgtgccgtatgggaattcttcttgcggatacacccgaaagccggggcgatgatacgcctcctcttttctaccgcatcggtcctctggtcttttcctaccgcggtccctctctcctatacgaccgcttcttctccgctttttcctgcgaagaggaagacttcgaccaggaggttcttattctgaccgggaaaccggcttccattccttacggcgccgtgcttattcacacggaggaacttaccatctgcgacagcggaagttcgtattgtttcttttttgcagcgccgtggggcatccgcgaaatgcatgtaaaaaaagacggctcacgcgccgtcctttaccgcatgccggatccggatgatatgcacctcgaagacctgtttcacgcgcttcgcttcgcttttctcatcctgacccagcagaaggagctttatgtgctgcactccgcctcttttttgtaccgcgggcgcgcctttctcgtttccggcagttccggaaccgggaagtccacacactctgccctgtggcatgatctgtaccagacgcccctcttaaacggcgacttaaacctgctcggaatcagaaacagcataccctacgcctatggacttccatggtgcggcacatcgggcatctgcaccccgaaagactatccgctcggcggcatcatcttcttaaagcaggctgccatagatcaggtgcagtccctgcagccggacgaaaaagtgctccacatcctgcagcggatgatctcccccgcgtggacaaaggagcttctccttcgcaatctgcatttttccgaagccctcgctccgctcatcttttcctgccggctgtactgcacgaaagagccttccgctgccaggaccttaaaagccgtcatcgatgctctttagaattcccgcatcatctgacggatctcttcctcctgcatctgcacacacttctgctcccggatgcggtacaccttctgacagatggacaataccgtcgggcggtgtgttgtgacgatacaggtgcgtggctccgtggtactcatgatattccgcagcactctgcgctctgttgcgacgtctaacgccgaggtcgcctcatccagcagaagaatcggtgatcggcgaagcagtgctctggcaatcgacagacgctgcgcctgtccctccgagaatccgcctccacgctctccaaccatggaatagatcccatcgggaagtttttccacaaactcccaggcacatgccgcctttaacacttcacagatttcctcatccgaggcttccggtcttacatttctcatattttccgcgattgttcccgaaaacatggtattcccctgcggcacataggaaaacagccgtcttgcagagggatctacggcgatcttctccccgtccgtctccccgatcaggatccgctctccctcctgcggatgcaaaagccccagtatcaggcggagcattgtcgtcttcccctccccggagggtcccacgagagcgacaatctccttgggacgcgccaaaaagtctgcaccgcaaaacacctgctttccattatgataggcgtaactcaccccggaaaagacgattccgatgccatccgaccgattctgtccggcgaactgctccacctgatcggcatccgaaaaatcttcctttggcatatcgagaatgtccatcagtcttcccgccgatgtggttaaagacactgccgttggcaccagggacaccagctggtttaaggttcccgtgagagagcccgacagcgataaaaacatggtcatggtaccgtaggagatcgcaccgctccacacacggtagattccaaacccgtagcagctgtaggacaccgcaagtcccacgatcgacagcagaattgaggtcgccatggacattttctgaaactccagcttcatggtgagatactcccgctgcagaccgcgcagacgctccgcgtacagccggatcagatcaaatgccttgatcgtctggatattggaaaacgcctcctgattaaagcccgacatctttgcgctcatcgccgcactccgctcattattccccttcatgcggcgaagcagcgtcttcgacatcagcatgctgaccggcattccgatcagcgctaataacgcgaacatcggatcatggtagaacacgaccgcaaaggtgctgacaaaacgcaccgtatagatcacgagattcggaatccagtttaggacaccgcttgaaatattggaggcatccgaactccagcgcgttaaaagatctcccgtgtggtagttctggattgactccagatccgtcaacagcattttttcaaaaatatccgccttgatggcattgtccacgctgatgctgatcttgtttgcaaagtaattggagatctgggaaatcaggacatttccaaccgagaacccgatatagaggcagaaagtgcgcgccaaaagccccgcctgctgtcccgtgactatatccaccatatcgcgggaaatgagacttgaaatgagcgataccagcgttcccgcaagtcccagaaccgtataaaatatcatctgcttccaataaattctcgcatattcgtagatccatagcgtctgtctccacatatcacggagcattccctctttgatccgctctctgtaatgtctgaacttctcaagcattgtaattttcctattctttcataaaaatgaattctgtctgcaggattctccgcctgcggcgggtcgctcttgcgacatctttcgtctccgccgcagtgcgatccctggagagttttttatgtaataggaaagaagtttcctattacataaaaaagagcttcacaggaggaaccgattcctcccgcgaagcttttgacttctcacatccgcccggtcgcctgccggcttcttaatctgtaatgttcacgcttgtcaccgcaagccccgcatctgcctgcacaaccagatcccctagtccgatattgtcggtcggattctgatgatagttataattgatcacaagtgtattcgttccgctgccggataccagtgatccgccggaactggtgtaggttaccggaagactgaacgaaatggtcagtgtctgcgcctctttcgtatgatcggcactgtgctgaccgtttacctggatacggtactccccgcttccggactgcggtgtctgatgaatgtacgcgctcgccgtatagcatccgcttgcaagatagaccccttccgcaagctcttctgttctaagaatcacaggactctcataattcgtcatagcatttccccccgttttaaagattgttacatgttccagtctgtgaccgcatcatccggaccatagcccttcttctcccatgacggcttacggttaccattatccacatcgtaacttcccgcatacccggaatccacataatggctcaacagaccgcagccggaagcagtattcgccgggcatccaagacatccgaactgctgcttgtatccgcgtgtggtgccattccagtcggaataatccggcgcctgccacacaccgttcatgtagacactgtcacacttaatgcctccgctcgcaagataaaccccctctgcaagttcctccgtccgtatcatcaccggacgctcataattcttcataaaaccagccaccttctaacacttttttgcggcacttctgccgctgactcatacacatattttaagtataaaattctgtgtttgcgctgtcaagcatgaattttctgccagaacggcatgccggcattttctctaccaaaccatggtatccggggtcagtcccttctgttcccagacaggctgataaacatttccggcgacttttgcatcacccttttgcagcttgcagccgtcaccgtcatccgccgcacagccctcgcagccttttctgtcataggcacgcatctgcacattgctgttgctgtaatccggctttttccaggctcccttcatgtaccggctgtcacattcacctgccgtcggatcttccccggtctgtccgccgcttgccagatagacgccctccgaacattccgtcatcaaaatcacttccggtttttcatagttctgcataagaaaccaccttccacaatcctaccacatacaggattctttttcttttcattatagtggtttctgcggcgtgattcctcatacaaacttgtgatttcttgtacgattttgcacttgtaagcctttgtacttgcatcgttgttcacctatcgcactgccacctcaccgaggcagtatccgttttctgtggcatccgcttcgtttgcaagtaaaatctgttccccgctgtctgcatcgctaagattgatatatacccggtaagtcccgctctcccagccgcggatcggaatggttccggtgagcgccagttccctgtcatcctcatttccaccggaaagcttaagtagttcctcttcccattcatccgtatagcagactgcccccgcctcatctgtaacgctcacacagacttttgtctgccggtaaaacggtgcaaacccgctgttttttaaagcagcatttacctccaccgtatccgcccagaacgaatggctcaaagcggcaccggcaatccacagacggtaccccagatgccgttccacataagaccagccgtccattccgtcgtagcagtcatctgtattcacgaccgttcctgcccacttatccaggacattcctgtcatagtcctcgtttaagtaactcacatgcatggtttttaaatccgcgatcgcattttcaagatcattgtacgggttatcgacaatcacttccccgccggacggcacactgctacacaatacatcctgaaatgccagttcttcctcccgcgtccacgccgaaaaatccccggcgtcctgtctggtattatcgctgtaagttccgtaatcgctcacgcttcccagcatgccgtcattaaaaagtccaagccttttggctagcgggttctctgtccagccgtccggtgccgcctcccccgtgatttttctccactgcgccggcgtccgcacggagagaaacgtggacgcatcgctcacatcggcaaggcgtgccgccagttctctcatggaatccgggtccgtgtattttgttccgttcatctccccccagttgccgataaagagtccctgaagcgtatagatacagctgtgatactcccgaatcacatctcccacctgctccatatgctgcaatataatgtcaagattctccggttcatactgctcgttctccccgttccagtcatagaggaaacggacgatccatttcttgtcgctgtccgccatggctgcaaacaactgccggacattggacagcccctcctccgatatggcacccgtccggtattcccgcagattgatctgcatcattccaagccgcgtcgcgtcatcttccctcgtcctgtctcttaaatctgtggcatagtcgaccggttcatccgtaatgcggtagccgtaaatgtaataaaatccgcggtccggattggaaagcctcctggatgactctgcaaacgccgccggcgtacatgtcaccttccagtgaaacagactgcccatttgagctgctgctataagacacaaaacaaccgctgcgccaagcgccaaaatccttttccaacgtccactcatgattcctccagctgatataaccgataggtgttctgccgtatgatatagcagcagaaattctcatcttcataatataccttcatctcctgcggataggatgcttcaaacttcctgcaccattcgtacgctttggattccagtatcgtgcggctgtccagattggaataggtctgcgagagttttgagaacgtcatcatctccttctctgcctgctcccgcgagatctccgaggcattgatgctgttcccctcgctgaaataggtcgtatagtaagaagtgtatttttcctctgccagccagtccggtccggtaaagaagtggttctgcgcgtattggatcggccgcttctccacatacacaaaaatgtattccgtcggcagggtatagccacttccgttcacccggttcaggaaagtcaaaagctcctcatgccgcccctgttcgatcacctggtaaagttcgtccgtggtagacacaatcgtatagctgttctccgggaatttatccgtgatgtcctgtgtcaccatcaccgccgcattgtatctggtcagttcatagtagaggtatccgtgaaaaatgccaagctgtctcgtccccacatagatcaccgccactcccgcggcaagcgcaagcggcagcacacgtctgccgggcgtaagggcgattgccccggcagccagatccaccggaatgaccacgaccgccagaatgaaaagctgttccgtagagcatagcctggagcctgcaataagctccggcagcccgaggaacggcgccgcatagacaatcataagcaataccgatattccgaccagcaccggatatccgtcaaacagctgccggatctttttgctgtcacttcccttttttagcaggccggtgataatccccgccgccatccggtacaccgcccagaggatcagtgccagaccgctaaaaaccacaatccattccgcccggttctcacggtacagctgcacatacccgtatttccagaccagttgtgccttgccggcgaacgatgccgccatccgttctgccatcgcaagcatatgattaccggcggattgtttcggagcactattttgtcccgcatccgcactcccgccatccggtgtctgcccgttccccccgtgggattgttccgtcggctgcaccgctgcttctgtcgtctccccgctctctgtcatcctctcaccggaccatgtctgctccttcgatgtctgctcactcgatgtctgcgcctgttctaagatctgttccgcctggctggtacgcccctccgcggtatccgtaccgtttatgacattgaccgcccatccgatcgatccctggaacggtacacccttcgcatacgcaattcccatcggcagcaccgctatcagcacaccgaggcagaccgcctttacgagagatacaaaccttctcttttgaaaaagagcgggaagcctgcacgcggcaatcaccacgcagaggaaaaacgccatcatcgtgacataaaaatgaatggcaagggaagccgccagtgacagcagaaacagcagcagattctcatccgtcaaaaactttctgatccgctctctccggctgccggatctgtcgctaaagtccgtcttaaggcagcgaagcagaaacagtgcgcacaggaattgtgtatacagtccgaactcctgcggcagcgtccactgcagacgggacatggaaaagatctcgtcaatgcacaaaagatccacggtcaggaacaacgccagtgcaagcaccgcggttccatcccatgcaaataattccttcagcagcagatacgcgctgaccagaaaaaccgcgacgtggattcccgccagaaacagctggctgctataaatctttaccccgaacagcacgcgcatggcgtagataaagcagtgcatggcttccgggtagattccctcataaaaaggcgtaccgtttaacagcccgtagatccacgagtggtggcggtacatatcgccaaacccgtaggagtaatcatggaatgccccgtaggaaaaatacaccatgccaaagcacacaaccacccccagcatcagatagacgcagcgccgtccccgtatgctccgcctgaattgtgcatgtgcatgcccgatcccgttttttaccctgttgtgcaggcgaagcagcaaaagccggatgccgtaggttcccagaaacaggcgggagatctttttgatctgctcccgccgcacggggtgccatctcagcaagccaagcagcaatgtgccgtaaaacagcacggcaatcagccatccgtacagtatatgaaacacgcccagacttagtaccaccgtattgagcagcacaaccggaaccgtcacacagaaagcaaaccgcaccgtacggctcctgcctcttaaataatcccggaataccacagacggccacacaaacagaatcatcacataggcaaaaaataccctgacatattccagtgcccagtaccatgtatccattttgctctcctcctttcccgtcgaacatcctattttctagcggaacagcttcatctcctccacaagctttccgcgcgctctcgccttctttaacaccgcgtaccccgatacccggcgcatcttaacgttgcggtatgcaaaaccgcagaacatcatcacccacaacaccggatgcagaatgcggtagcgccctgcccctggataggtgagcagcatctgatgatgaaattcccggcaataatcccgccagccggttccccgcagcgccaccatacggtcggcacttgacttgccgaactcctccgcttccagaatctctgtcaggaatgcttccagatttgcagcttccgcctcccagtcaaatctgcaaagcagcaggggcactttttccccggaaagtcccagatattttacacagaccgccgtcaccagccgcgcaaatcccatcacgcggcattcctctgccatggagaaaaaacgctcctctaccccgctgccgtatcccttttcccagaatacgacccagtcgcaaagcagctttaacccgaatccggcacgcaggaaatgctgcagcatatgaagcagcaggtaaaacgcatgatatgccggctgcagcaccggaaactctacgcccatcaccgccgtcctctcacagtgcgccagaaattccgcctgatgtgcggcgagccactcgttgacgcttttggagtcgaacggctctgccagcgcaacgtgaatttctattccgatctgctctgtgccaacgcagacgatatgatggtgtgcatgctgctctgaggctttccggaatccatgctcatgcagcacctcatacgccttttctcccgctttctgatccgcaacgagcagatcaatatccccggacttgcgaagttccggcaccggatagagtcccgccgtgccgctcccctttaaaagaaccgtctcgattccatgttcctgcaaaagtcctgtcacatatttcccgaggaacagcaggcggtagctctgccgcaccgtctctgcgcttctcttctcaaggcgcttccgggtctcatcctcctcgggcagcttgggtgccagcacgtcgtacagcagcggcagcacgcgatgccggtctgccagttcaagaatggctccgtatttttcagccggcgggagcatttccgccggtctgccatgcagcgccgcatccagcagcctgcacaaatcccattgttcttcttccatctgctgtctcatcacattcctccccgatgcagcctgacccactcgatgcgccgcaggcgctccaacacccgtttccattctttcgtcctgccgtatgccataaaaaacaacagattgggcagcaccacacagagcggcagccggatgagaagaacggtaagcggacttccctctgccagtccgcagaccaggtctgtcacaatccataccgctcccacacagaccgcatacaaaaggtagcgcagataaaaccggtgcaccggcagatgcagtcttctccggtacaggacaaacggctccacccacaccgacgtgagaatcgttgacaaaaacgttccgataaatacgccgagcgtctgatactgtcttaccagaagaatcgacagcaccagattgagcgccgcctccgccagcgccttgtagcgatcgaaccagaacaatcccatggaatcccgaaaggtcagcaccgctttcctggttccgttgataaaaaagttgaggcataagatcatgacaacggagcgttcaaacagatactgtctgccaaaagccagctccacaaacggattgagcaattcgtacaggcagatcgccgcaaacccgtaaagccactgcccgataaaaaaggccgtctcaaaaatctcgcggattttgccctggtcctccgttgctcccagattgcccacactcgctgtaattcccgcaaagacctggtccaacacctggcggacggaaccgatcagaagataataattggaatatattccgacactgaccacgccgacaaacgcggagatcagtaaattatcggtattatttacaacgaccgtcccaagcttgtgcatcatcatggctcggatattctgaaacagtcccgtccgctcctctgcgggaagacgttccttctctttttcctttaaatacgggaaaagcttttccgcctttcgcgagatacacacatttgacagaaccgtgcacatcagatacatcaacaaaaacagaataaagtttcccgtagtaagcagcacaacaatctgcagcagatcctgcagcaccagaaagccggtctgatagatgagcaccacataattcatctgatgcgcctcaatcagcgtcctctggtacaccagcagatacgacagcacggagttggcgagatagagaaggtaaataaacgtcagatgctccacctcgggtctgtttttcatgagcacgtccataaacggaatcagcgccagtcccagcacgcccacacacaccgcggttccacggtaaaatgtctggtaaagcttcatcagctgctgctgctttttgatgttgccctccgcgatcggccggtacaaggcgtaagtgattgccgtgcctgcgccaagctcggtcaacgaaagcacgtttaaaatatcggtgaacagaccgttgattccgacatagttttcactcagcgtatgcgtaaaaatcacacgcgtcacaaatcccatcagaatcgccgtcattctggagatgaccgccacggttgtattcattgccgaatattctgttctgctctttgtttccatggcgtctcctctctgtcttagtgcttttcccctgctccgtccgtttcaaaggaactctttttcggaaaagcttttaaaaatgcttcgtttaattccctcttgaccctgtcatacacctccaccttctgggaatcattgatgcagacagccgggctttttttcttctcaatcacatgaagcagcgatgtattctgatccgagagatcataatacctgcagaaccggcaggcattgacaggataaaaattaccctccagcttctgccattctctgagcagatactgactcacatcctccctgctgcggaatctgtggctgcacacctccgacaaaagcgctccctcccgctgccagagcgcctcgtaggtgttctttagaagcggcgacggaccatgcaccgtataaaatccggtaaaccgcgggaacatgcgctcgagcaggttatacccgaaatataagagcggataccccggatgccagtaggctcccggctgctgcttcatgttttcccgcttgtcaaaatacctcgcaagcaccatcgcattgttcagataaatatacggcatgacggcatcctcccggtttgccacgaccggctgcaaggcaagcatgtcaagcggctttccgtcccggaaaaactgtccggggcttacctgctgtagcagaaacatatcgtcgttaaaatagacaaactgttccgacaatccggggatgcggtgaaaattgagttcgattgtgtgggaattaaacgtcggcaggaattctcccgggatataatcctcgtggcgcacaatctcaagcttcggatgattcccattcagccacttcggcacatgcccccatgtgacaaaatagatcttgtgcacccacggggcattctgttccacactgcggaaccagaaccgcaggcagtcccagtcacggtagcgcacatccctggtatcgtaggcaacgccggacttctctctctctccggtctcttccgccgctgttttctcccccatcttcccatagcggtcccgctctctctgccatgccggatctccgccgtcaacccaggcaatcacaaaatcaatctgtgtttcctttttctcttccatgcaatcctccctgcaccatccatctgccgatcaagagccggcttcccgcgccttcgttcgcaaacggcagcgtttttccgtctttcttccgcaccatggaaaggtagagtttctcctcttttccttccccgccggcttctcccgccgcaatttcaacctttgccacgtccgtctgaccgccctttaatccgcagatctcataaggaaccttctgcaccttctgctctttgccttcatcacactcccggatcagaagcagatccgttttctggcatacggcggaaaatccttcatttttcagtgtcacccaaaggcttccctttttccactctgcacaaagcacacagatccggtaaccaaggcggctgccgatctcctcatacagcgattttccggacgggagacggcatgccttccactctgccatccgcgccgggtcatagatgctgtttaaataggtcacctgcatcttttgaagttcctctaagaccgtctctgcagacaactttattcccgccagcgcctcccctccgcacagaatattttcatcctgtccgctcagataagcctgctcatctgccgcacaccacggttcttcccagtctgccgcctcccgcggcacatccccgaacgtccccatatggtcggctccggcaaacatggcatcatcgtatagtcccagtccgcgcaccggcctatttcccgccagcatgcgcagatgcaccggctttcgcaccgagagtgtcagcgcatggtgcgtcgcctcctgccaggtctgcgccaacaggcagatctgatccgggcgcaaaaaccgggaggtatgcatctctccccagcttcccacaaacacgccctgcacggtcagaatggcatccgcataccgttccgcaagactaccgagcgcctgcatgtgtctctgcaccacaaaaatgcgctgcggctcgcgctccatcccctttccctccgtatcgtaacagacgcgcaggatcatctcttttttccgctcttgaaaggcacgaaaaatctgctccgcaaagtccagtgcaagagtgtccagttcacgcgaggcgtaatcgcggatgtccagccggaccagagcaagtgtctccccgggataatccggcagccagtctaaggatacttcctccggtctccccagccggaacgtgtagatgtgataccacccacgccccggagcaatatagggcttctgctgtctttttaaattttctgcgtgaaaagaacgcttactcctttttgtccatgaaaacatcccgctctcctgcccccgcatcaattccaagcaccttgatccgaaataccacgccgatgatggagaagaccatgcggaacatatagaccaccggtttgagtccggagtgcatgctggtgccacagcttctcgcatgcatgacagcagggatctcatctatgcggaatccgagcagctgcatctgaatgatcatattggcatccggatacttgtcgtcaaagtgcttatacttcgagtaatataaaaatgccctgcggttaagtccctgcagaccggtcgtcggatcggcaatctttcgtccggtactgatctttatcatccagcggaagaatccgtatgccagtttcttcgtagcggagaccggatactctgcacttccctccataaaacgcgaacagagcacgatatccgggcagcgtccgtccgcatcctgctgttttagtctctgatagatcaccggtatgttgcacacatcatgctgtccgtccgcatccatctggatcacataggaatatttgcggcggatcgcgtatttatatccaagctgcagggcgctcccgtaccccagattaaagacatgggataccagcgtatgtccgtgtgcctttacgacccagttcgtagagtccgaggacgcgtcattcatgaccagaatatccgcaatctccgcgatctccgggcgttccagctcctccagcacccgctctatatttttctcctcattgtatgccggaatgataatcagcagttctttctgtttcttctctaccatcgtatcttccttattctttctcggaaagcagctgctccaacagccgttcctcgttctcgtaatttacaggacgctttaacgccgcctgcgcgtacgccctgcgccggtccggattccggatcaggaagcccacagcttcctttaccgccgcagcgtcaagcgcgcacaaaatcccgtcctccccgtctgtaatctgctctctgttacattcggaagcaacgatcgcacagccaagcgtctgcgcctcctgtatcgcaatgcttttcccctcatatccggtcgcatgcacatagatatccgtctgccggtagtacggatagggattctcaaccgctccaagcagcaggaaatcctcctttaatccgcacgacgcaatgtgctgctctaattccctgcggctgcttccctcgcccagcacataccaccggaccgggtatccctccgcctttaactgccgcatcgcttcgatcgcaaccggatatgccttctgcggggtgagtcttcccactgtaagcaggcggattccgtcgaaatcatccgtaaatcctcccggctgcctggacatcttccggattttttcacagtcgatccgattgtgatagatcctggtgcgtgcactgcactccggatacacggcgagaaacgcccgctttacctgttctccgatcggaaatacggcatcatattgcaggtagcagtcgcggtccagttccctgctgtatcccgccttctgatagtcgatatgaataaacgccgccttttttttcgccctgacgtggtctgccacatagtatgcagaaccgccctccaggaatgcaactgcaagatcatattcctccgggaagcgtctggcgccatccgagattgcccgccacagcagcttgtccggcatcagccgtccctctttgcgcattgcccgcgcgaccctccagtgatagcgccacagccggatcaggttggctctgtgaagcagacattttacaacggtcatgcccatatagattcttccctttggttcgagcaccgagaccggggcataccttggattgacaagccgcaccccctctggtatctgctgcaccagttctccctggttcatcaggacaaagagcgagagctcatatctgggctgcccgtcctcccccctctcggcagcaagctgcgcaagcagttccaacagtgccgtctccgctccggcgcggcttaatgtattaatcacgaacaatatcttttttttcatctgtcaaaatccccagcctgtgcaatattctctcattttcctgattgagcagggaaacctgcatggcaagctcctgatttttcatggaaagaaccgacaccaccttgcttaacttaaacagcaggatcaaaagcagcaggcagactgccagaagaagcaccaccaggtattcctcctcccttgcccccggcacggagaccacgcccgttaaaatcagcgccaccgagacaaatgcccacagaagtccaatcgtatcggtcagtttttgtctcacatacgcattgatgtcccccaaaaggaacaacactcccgctgccgtcagaaaaatccgcagaattaaaatcacattcatatactaacgctccttctgtttctttgtatataccatactctccggcatccgctctctcttcaccgtaaacagctgtccgccgcagaagatatgttcatccatatggcgctccatgaacctgagtctgaaataggcaatggtaaagccggtaaagctgcccgccaccagccccatgccgtaccacaggtcactcccgccggcagaaagcacgcttcccgcccacgtcaccagacaaaagccgagggttgccaaaagcgcccctgtcagatcgttaaagtagtacagaaaaataatttctgcatacagaataaataatataaaatatccggcggcaagacaaggatagatctgcatcactcttcccgagaacccgtactgcggaagcaccaccacgcagagcagatacactgccgtcgagatgataaactgtatgcgcaccagattcataagctccgcagaaagctgccggaacattctgtcttttgtatttttgatatcttcccatcttcctccgataaccgcttccgaatacgccttgtaacgtgtgtggaaatgcatctctacccgcgtgataaaaatgatggtcgacgacagattcgtaaacatcgccagacaggttgccagatcatacgtcggagcaaagacaaacgtatccgccacgcgcatctgtaaatccgtattccagaacacaaaattatgaatatacagaccgagggtatacaaaaaattgatcaccaccagcttccagtacctgccaaaatacgaaaaaactcttctgtaccggttgctgttcctcttaaaataccgcttcaccgtggcgtattccaacaccgccgtaagaaagaatccgatcgtgagggaaagcagcatactgtagacaatctccctaccgcatacttttacaaaaaagagggcgcaggcgagtgccgccgccatcccggtcaaaaagtacagcgatatcttctgataatccttacagatggagaggtaaagcatcgaataaaacacgagaaccagtgcgatataaccgcaaaatccggtaaacacaaaaatcaggttgacatgtcccacaagatgttcccatgcgcaaaacggaattccgagaagacttgccagcagaatgtttaaaagcagccccacatcgtagcagggcagaatatcctcatagcgctcctcatagatgacatccgacatatagcgggacaacaccgcattaaaaggcgccgccgtcagaagcgaaaagataaagatgtaaagcagcgttccggaaaacagtcctcttctcgcatatcccacattctcatatcccaggagctgactcatgagcatgatcgttccgatcacgacaaacatcggtgcgaccgtcacgaccgcactgtagccgaatccggtcagatatgcaagaatcgtttttttctcatatattttctgaagcttgattcctattcctgccacagtctctctcccttctaccagtctatgttctcaaacgtttcataaatcttccggtacgtctgctgcatatccgaaatcttgtactttgccatcacacggcggtaaccgttttctcccatctgttttctgcggaccggatgtctggcaagattcaccatggcatccgcaatttccttcacattcatgatgtgcgtcaaaattcccgcctcgccaaaatcatcgtcctcgccgtacaacagtccgcggcagtttccgacatcggttgctatcgccggaagcttcgccgcatagccctccagaaccgttaacggctgcccctcgctgatactggtcagaatggtaaaatccagtccgccgagatattccgtcacattcacccttccggtaaacaccacatccggcagttccatcagctccaccagctcaaaacattctctcgcgtattcctcgtcttcttccgtcggccccatgatccataattttaagttaggcacatcgcgctttgcatacgcaaacgcccggatcatggtcttgacatccttgatcggcgtcacgcggagtaccgcaccgatgtgcaccatatccggctccatcgcttccggacgcttcaaaccgtcaaaccgcgccggatcaatcccattcggggtaatgctcgtcttatccgcaggacatcccagttcgatctgaagctctctcgcgtgcgcgtaaaggcttgtcaccagatccgccctgtcataggcaagcttcgacattttcttgaactgctcaatccagatatttttatagatgccggacacccagtccgcacggatcagttcttcctcgcgctccctggtgtagattccatgctccgagatcagaagcctgcagccaaacctgcgctttgccatgctgcccagcacgcccgcatatcccgtcgccacacagtgatacacatccgccctcggcagccgcatgccaagtgtcagaaacagcggaagatacatggagcgcatcgtccagaggaaatcagaaaacaccgcccccgcataccgcaccgtataacattcctgcaccgcccggaaaaaatcctcccccatgagaagttcattcaaagagaattccttctccccgaaaaaggagaacagggtatcccagtctacattctggttcatcaacaggctccgcagtgcggcgtactcccgctcatttaacttcagtctggctgctcttttaagttcttttggccgccagtctgcatcctccagatacagttcgtgcacttccaccacattctccgggagatcgtagacaaactttccgcgcagcgaacggttcgccacaatcgccagcacgacaaactggtactccggaaatatttttatcatactgtgtatccagctcgatacacccccgacaacatagggatagcatccctctgccacaatacatattctcatgtgccgtcaccacgctttccgccgtcctgatactgccatgtttccccggtctgcacttccacggagacctcatcttcctctgcaagaatcaggtagacgccgtcttctatctcttcaaagattccgcccgcaacttctgtgactttctctccgtgcaggcgcagcagaaaccatgccgcatcctcccggtgctctaaggaaagcgtaatcacattgcccgcgcgctgctgcttatagtcaagtgccagaaatctgcggatgcgcacatcactctctgtcagggtggttgcgtcaaacgcttcatacgctttccagtaggtgcccaggtttgctgcgatcttcttggacattttctcccaggaatcctcgtccccttccggataagtcacgctatagaagtcgagtgtgatgttggaatagccgagcgccgtctccatgcatttcactttaaaatcatccagaaacgtatgccggattccggaactcgtcgacggctgcagtgtgacgttctcattgagataccccaccgcctgcccgctggcgccggatccgagcgcaaccgtccggatttccgctggaagggcactcttctccccgatgctctttactccgtccgcgtagagggataaaaaccggtaggacggcgcataggtctgccagaacgtctgatcctgctttattttttctgagagcgggatcccttccatgctgtctgcggacagtcccgcctccgcgtgctcctccttcagacgtttcaggtaataggtgacgttctctccatccggctcttcctcatccgtatacgtaaactgcggcgtcatcatgcaggtcatctttgcccccgtccgggaggcaatggaggtcagcgacggccacacaatttcctgatacactgcctgtgcggactgactgtagcgcttctgcatctcctcctcgttctcggagacgaacgccggcagatctgcaatcacaagattctgtgcgttaattaccgggtagatatcgtaatcgtatgtctcccccatcatggcgtccagtattccaacagcgcttatgtctgcaagataatccccgttcacacagaaaatctttgccgtatccacgctgtttctccagagaatggcaggcagaaggctgttttttgccgcctcttcctccattcccgcatactgtgcccgtatttcgttatccaccgtctgttcgatcgtctcatcggacagcgtgccgaccatataggtcttggttcccgcgccggtcgtataccagggaacagaagggttcatgtcctgacgctcctcctccccgagttccgtgacctcatagatctcttccccgccgagcagaaagccggaaaacagatgcatgcccgcaagcggtatctcatccgcaatcaccgcgcggattccgagaagctcccttaaatcccggtactcccttatcacagagctctgcggcagggttgcaaaaatcacagtcacacccatttgtgcctctctgcgaagcaccgccacctcttcttccgacgtcaccttgctgccgtccaccaccagcacctgcagtacatcatcctgcaggctgtcaagcagtgcgagggagctgctgcaaaaaaacgtccgcttgcggtagctgcaccatgtctttaccacggattcctccgctccccctgcttcgcccacatagatcacctcgcaggcgtcggcagatgtctgttctgccagaaatgcatccgaccgttgaaaggatgttgtggtatcgtctgcatattcgttgctctcatattcacttaactgttctttcatgacgcctgtaaactgaaacataaaaagcagaatcacaaacatcattgcaatcgtcagataatttctgcgtgataccatgtcatttccttcctgccggactaactgaacgtccggatcagctctaacgtctccctgtcaatgacgatattggacgctttcagccgatccagttcccggaaaaattcggttttcttctcctgcgtaaaatacattttcaaatagcaggtgtacgtggaaagcgcatccggatataattcccggctccggttgcaccagtaatgcatccgcccgaattcctttaagcggagcagcagttcacacagccattcgatgtattgcgcagtgagtttccggtaatctttttcatagagaagttcacacgcctcctcaaacatatccacaaatgtccgctgttcggtctcgtgaaaaacattctgttttaagacgacatacatgtactcgatcagaaggcaggcatcatcccccgcctctctgccgtccttttgcatctgccggtagagtttctgtgcatgctgcctgaaatcgttgagcacatcccgaagcaccgacgccgcatagtgggaggtctcggtgtcctcactgtcaagtgccagcgccagcgatccgagagagtccgtgacatctcctctgaccacattcataatcagtgtgcgcagactatcccggtcggaaatcgccagtgcctcctcgatcggcaccacattccgctcctgctcctcatccgccataaagtgtgttctgacacgctccttactgaaaataacatcttccagatccgccgactgtccgaataaaagatgccgcgcgagttctcccgccacaaagaagacgggaccgatcaccggtgccaaaagcataaccgccgcgcggattcttccgccggtgcgctttccgggctcttctctccagtgctgctcattccacaggacatacgccgccgtgatgcacagattcagtaccacaagcagcagaaaatacgtttcgatcctgctcatagttccatctcctctttcatcctgcacggaaagcctgcgctcctaaaacgctccacaaccattcccgcatcctctgcgctcgtgttagcaagcagtgcgtacatctttccgtcggagagttctccaaggtaatcactctggcgcatcatgccggaaaggacgcccgcggcttcctccctggaggtctcaccctcctcgaaaacgacgagcgcacactccgtcagcttcttctccctggcgttaagataagccttcaccagagaagcaaacgcatccgcctccaaaattctggtgccgtggatatagcgttgctgttctaacgccgagagataacggttcgcacgtacaaccgcgttctggatcagatagccgatcacagtgagcatattcgcctgtccgagcgtcattctctcccatgggattccccacaccatcagaatcagctgcatctcatcctccgaataaatggcatccgccatcagcggatagcgctcatccatggttttgttgatgaacacttttttctcccgcagcttttcatagaattcttccatctgcacatagtgaatggaatttccgagcatgcgtgccttcggcgaagttgccgagaacagacgcgcataggagtggtttgccaccgtatagattgcgacatcctgactgtccatcagctttgccagcacctctgcggcatagaacaacacttcactcggctcgtacttgtccaggctggacgtgatttcatacagctttccgaagctgtcgttctggttgacgatctgatttgacagaatctccttgatgcgcacgttgctgccgttgacatccgagatgtcctctacctgtctggagaggaaatccacctcatggcgctcctcctcctccaccgcatgcagccggtcgcgcatatagccgatcacaagtcccagaatcagcagctgtgcaatccatatgtacgtgttgacatccagcaccacatcaaaaccgctccgctgatacatctgcaccgcaagataccccgccaccgcaagaatcgaggagaatgtcgcctgctgctgcccgtaggtaatggcgaacagcagcacatacagaaggtaaaaatcaatgttctggaaatacgcgctccccgccatccagttatttaacaggaaaaacggaaggaaacaaagcagattctccgcgaacggaatcatcgctcttacggcctctctcgaccgctctccgaaccggctccatcccttttttctgctctgtgtccgcacaaaagaagatgcgtgctgccggatgtacgccgcctccctgccaatctcggtctccggcttatgtacaatgcgtatcccaaactcctccgcaaatctctggttggacaaaaccggatccatccgctctcttccggtgtcctctacgactttcacaccttccagttccgccgccacaaactccgctgcgcttcgcacggaaatcgtctctccggaagaaatctgatagacgccgtacgtcatcttttttgccgtaatcaccgcatacaaaaattcgacggcatccgaatagtgtaacagcgccacacggttgtggggatttacccggatctcaccggtttccagcccctccacactcatgcgggcgcagatatcacgcgcttccgccccggtaagcggttccccgtagagatgatccagccgcagcacgatcgtctcatagcccatgttaaagtaactgcggcagagttcctctcccgccgcaatcgcctgcgcgcgtaccgtataagccgcacagttttcctcgcacgaaatgtcctgtgtatactctcccccgaagacttcctccgacgagagatacaaaaagcgtcccacattaccagccgtctcattcatcagcagctgaaacaggcctgaagtgtacgccgacgccgtgctgctccccttcccccagagaaagcctgtatcataggcgcccataaagactgtcacatccggacgcactccctcaagcacctctctgatgcacggattgtcgtatgcaaaatgatacgtctcaaatatctttttggacgttctgaccgatttgtcttctgccgtcaacaaaaacacacggtgcccttctttgtccagtttgtccgtcaaaagctgaaggaagcggcatttgcttcccaccaataatatattcatcgtttacaagatcccctgtagttccatttgtctgataaactgcatcacatctgtccgcatatcgtctgcggttcccccgtacatagtggcaagctcctccgcgattttatccgccgtgtttcctgccatatactgcctgaagatataagccccgctctcatttaacatgagcggcggccgatacgtttctccatcctgctccatatctaacagccagtattttcctgccgcgcacctgagctgatacctgtttttctgcatctgccatcctccgaaaaatcatcgtataattatagcacatctgacgctcaaaaggaaccggttatccgaaaatgaggacatactcttcttcggctttgcgcctcctgaaaaatatgtcctcgtcgttaatgcatcttatattccagacgtatccggtcggtaatcagtgcgataaactccgaattcgtcggttttccttttccgttgtggatggtatacccgaacatctcatcaatggtatccatcttgcctctgctccacgccacctcgatcgcatgccggattgcccgctccacacggctggaggttgtctggtacttcttcgcgatcgtgggataaagaattttcgtgatcgagttgagcatatccatgtcattgacggacatgacaatcgcatcccgcagatactgataccctttgatatgcgccggaactccgatctcgtgaataatatcggtgacatccgcttccaggttgcgctcctttgtctcctccgccttctcataggcattgaccttgcgcacttccgcaccgcgtcccgccgcaggtcttctcacattcttgatgcggcttaacacgatatcattgtcaaacggcttcataatgtaataatctgcgccgcgcgcaaacgcatcttccgtgattttctcctgaccgatcgcgctgatcataataaacgccggatgtttttttatggaggtgtcctgactcacgcggtctaaaacccccaatccgtcaagcttcggcatcacaatgtcgagcagcacgacatccggttctttcgcctttatcacatggtatgcttcctcgccgtcgcgggcgactcctacaacattcagttcgtcatcactttcgataatatcccctaataatcgcagcattctctcattatcatctgctattgcaacattcagtttttccattttagcccctcctgtgacaaaactctttgcttactgatgatactgattccaacgcaagaaaatttgtcgaagctagtcgtcaactgaagtatatgcatcattcgcgtatgatataatatgcgtttctgctgtttctcttcacatagtaaagcgccttgtccgcgtgctcaatcagacgcgctccgctctctgtgccctccggcacaaagcaggcatacccctgggagatggtaagattcggctgcacaaccgagtgctcgtttgcgattcccgcctccgcaatcttctgcaggatcgcctccgcgatctcctcgatccggttctccatccctgccggaaacaacatcacgaactcatccccgccaaaccggtagacatgtccgcagtccatcactgcctccttcagaatatccgccaccaccttcaggcagcagtctccctgaatatgtccgtaggtatcgttcagctgcttaaagcagtcgatgtccaaaacgccgaccgtgatccgctcaccgcccgcatcccttatgatatgcaccgcctcacgctcaagagaatagcggttccccagcccggtcagcgcatccgtcacagacatagtctccacgcgcttgcgctccgcctctttttcccgcagctggaccttgatgtcgatcgctgtggcgcggtccttcgcatcgatcgctttctggcgcttatacagatccgcatgtgccacacacagttccacatagcgctcttcgttccccacagtctgatagtagtccatccacaattccgtcagaaacagctggaaaaagacggttttctgatcgatcgtataggtctcgaccgcagatatggtctgcttccagtattcatactctttcatgtcgcggaacagctgacacagatccttcatatcgttcagataatccgacgcattgctgtctttttcaccgctcgccagaaggtcctccatgtactcatacacatagtccccctttcccatctgccagagcagcctacatttgaagatcagtaccgtataatgatacatctcctccacttcctcgtcaagctgccgctctgcctgctctaaatatttgtaggaaagctcgtacaggttcagttcgtagtaggagaccgccagattcaggtaggtaatcagagcccaggaacggtagcgttcctccttgatgcaggtcggattctgcagttcccgcgccgactttaagaaatagtcgatcgccttctcatgctctcccagctcctggtacctggagccgatattgttataaaagagtgtcgtgatgttatttagctggtaatcgatcgcacactcaagtccttcgaccagataatccaccgccatcgtctcgttccccgtggcgccgtagatcactccgagcagattgagcgctgtggcgtattttaacatgtcgtcgcacttcttgtagagatgaagcgcattctgtacaagcatcgccgcttcctccagcttgtggtcaaagaatctggctctgccctcttcgtagtattcatctgccagtttttgtatatgttcctgctgttccattccgtcttccgtccttaaagccaacaatactgactgtagtataccataagtaccagacgttgtaaaagtttttgtcgtacaatcacaacattttctcaataaagattccgtaccccatcgacgcatccgacacaaacacatgcgtcaccgccccgatcatctttccgttctggataatcggactgccgctcatcccctgtacgattcctccggtcaggcctaaaagccgctcatccgtgactttaaaaaggattcccttgttttcctcatccccactgtaatcaagactctctatctcgatctcatactccgcgcgctccccggacacctccgagatgatgtaggcttttccaagcgcaatgtcctgcttataagccacctcgtagacttctccttccagttctcccgccgtatcatttaacatgccgcggatgccaagcggcgagttctctgtaatgcttcccatgcaatgcgatttcccgtagtcaatgatccccgcaagttcgcccgggacgccgttcttccccttctggatgctgacgattttcgtctcgtaaatatatccttccgacaggctcatctgcacgccggtgtcgccgtcgctcaccgcatgtccgagtgcgccaaagctgccgtcctgcctgtagtaggtcagtgttccgaccccggcaagatcatcccgcacccagattccaaggcggtattttcccgtctcgcctttgaccggattcatggatacttccacatactcccccttccgcatcactccgatgatctcacgtccgctgccgtagctgtcaatcttgtccatcagctcctctttcccgcacaccgtctccccgttcacgctcacaatataatccccgctctgcaccagattctgcgccgggctgcactcattgccccacgcatccgcaatctttgcagtgccgagcaccaggattccgtccgtcttcacatagataccgatcgcctcgccgcccgcagtcacctcctgtctgtcgaccatcatcaccttcacgtcttttaccgggaaaatgccgaacagcttgcaggtaacggtataaaaaggggcctccgccacggcatcctcctgcccgtttaagcggtagaacacttcctcgctgtcgtcctttaacgtcacgctcaccggaacgccaaaccggtaatccgccttttccccgaacggaacgtagatctcatccggcagtgcccgctcaaacgtctttacggcaaacagcgtcaaaaacaaaaaaacaacccacgtgatctgctgtatcaaaaaataaaatttatgtctcatatctgcccccataccattttctgtaacccaaaggccgccacacaacaaaaaagaagataccatggtatctcatacctgtggtatcttcttttattatgtgaatatttttacttttcaaaccccgattttttgctttttgcaagcgcgcgcatctctctcgcactctcttttaccgtctccgtgatctccacgcctccaagcatacgggaaagctcctgtatgctctcctcctccgacagtctgcggatcgtggaaactgtcgtctgattctgtacggatttctggatcaggtaatgggaatccgccatcgccgcaatctgtggaagatgtgtgatacagataatctgatgtgaccgtcccagcacattcatcttctcggaaaccatctgcgccgtccgtccgctgattccgctgtcaatctcatcgaaaatcagcgtctccaccgcatcctcatccgctaacaccgtcttgatggcaagcatgatacgcgaaagttctcctcccgacgctacttttccgagcggttttaacggctcgcccgggttcgtagaaatcaaaaattccgcatcgtcgaatccgttcgccgtatactctgccatgcgctcaaaattcatcgtaaaacgcacatcaaggaaattcagatccagtagcgcctgcgtaaccgccgcggtaagccgctctgccgcctccttacgcattgcggacacctcgctgctctgcttctctaagacttttttggtccgcgcaatctcttccttaagaccggcaagatacgtgtcatagtccttaagctgcatcaggcgttcctgcttctcttctaatgccagaagcacgtccgggatcgtgctgccgtatttggatttcagatgatttacctcatcgagacgcttctccacctggtagaacgtctcctcatcgtactccatattctcgacataatcggcaagttcccggttgaaatcgcttaacagcccgtcgatctcaagcagctcacgctcgagttcggcaagtttctcatcgtatccggagactgacgagagttcgcgcaccgcccttccggtcagttccgacgcacagtccgattcgccgccggtattgctgtatgcaccgtttacggcattcacaatcttctgtccgttggaaaaccggcggtactcattctccagttcctcgtcctcgccttcccgaagtcctgcctcctcgatctcacggatctcgtactccaggaacgaaacctcccgctcgcgctctgcgccgtctatgccggcatttttctcttcctccaccagctttttgtagctgcggtaagtctctgcgagcgccttctttttctctgtcagcgtctctcccacataggcatccagaatctccaaatgtctgcgctttgagagaagcgactgatgctcatgctgaccgtgaatgtcaattaaaatcgccgcgatctcgcgcaccgcggatgccggcatactctgaccgttgacgcgcgccgttccccttccgcctacgattctgcggcttaggatcacctggtcatcttccggatagacctcgagcgcctccagcttttgccgttcctgcccgttctccaccgtaaataccagttctaccagcgccggagcaaactccccggtctgcggatcttctctcaacatttccttttgcactttttcacccagcgccagattgatcgaaccgatgatgatggacttacccgcaccggtctctcccgagaggatattgagtccccgggtaaaatccacctccgcctcgtcaatcagcgccagatttttcacatgcagactttgtaacatagaatctccttctactctccccaaaagaatcccgtctagtcttccacaagctttttcaagcggttcatcaccgcaacggtatcatccacactgcggatcgcgcacatgatggtgtcatcccccgcaatgcagcccacgatctcgtgcatatgcatggcatctaacgcagccgccaccgccatcgccatacccgagacagtcttaatgaccagaatattctgcgccatatccatggatacaaatccgtcgtggaacacgcgcacatatttctgcgacagattttcgtccgtctcctgcagcgcaacgtatttctgcctgccgttgctcattgcaaccttggtgagctttagttcccggatgtccctggaaaccgtcgcctgtgttacctgatagccctcacgctccagataatccgacagttcttcctgtgtttcaatgtcatttctcttgatcaattccagcattttcgcctgtcgtttggttttcattctgccctccgtttcccgcttatgtgtatacctgcatctttttgcttaggatctcgagaaagctcttgttgctcagctttaagatccttgtcgtgtccgaagccttccggatactgaacttatctcccaccacaagtcttgcggcggtatccccgtcaaaactgacctccagcgtctcatccttctgtgagcgccttctgccgatctcaacaaccacttcgtcctccgcaccgatcacaatactgcgtgaattgagattatgcgcattgatcggcgtaattaaaatcatctgtgccttcggatccacgatcggtccgcctgccgacatattgtagccggtagaaccggtcggcgtcgacacaatgattccgtccgcccgaaacgtatgcagatactccccgttcacatagacgatcaggctgactaccgacaactcccccgtgcggtgaatcacgatatcattcagggcaaccccgtattcttcccgcactccgccaaggatgcctgcgccggtgagcatcatgcgctcctccaccatacagtcatccgccatcagacggtcaaccgcgtcaaacacgttgctctcctcgagttcacacagataaccgaccgtaccaaggttcacgccgatcaacggaatcctgctgtccaccagcctggatgccgcgcggatcagcgttccgtcgccgcctaacaccatgacgcagtccgtcgctggatccatcttatccaaagcaggcgccgcctcgcttttgcgctccccgtcactgtaaaagcagtcacattctccgccctttttgcggatatacgccgcaagttctccagtgagtctgccgttctcgtccttatatgtatttgtgatgatcaaaaaatgtctcataagcttccccacatccggcagacgcccggtcattcacagacgtccggttacttgtctaactcgccgtgcgctgcatccacgaccgccttaatgtcgactgccgcatccacgccgcccgtctcatccttccggatgtacaccagatactcgatgtttccttccggtcccttgatgggcgaatattccagattctttacaaaaaatccgttctgtgacgcgaattcaatgatccgctctaccacttcctcgtgaacagccttgtcacgcacaacaccctttttcccgactttttcccgtccggcttcaaactggggcttgatgagacagaccatctcgccgccgtctcttaagagctcccgtgccgggattaaaaccttggtaagggaaataaacgacacatccaccgacgcaaaatccagcacgtcatcgatatccgccggggtcacatagcggatattggtcttctccatgcagaccacgcgcggatcctggcgcagcttccatgcgaactgaccatagccgacgtccacggaatacaccttgacggctccgttttgcagcatgcagtcggtaaatccaccggtggaagctccgatatccatgcagaccttaccctccagcgtgattccgaaatgcgtcatggctttttcaagctttaatccgccgcggctcacgtatttgagcgtattcccctttacggtgatctcggcctccgtgtcaaatgtagcccccgccttatcttcccgctggttctccacaaagacattgccttccataatcatggtctttgccttctctctcgacggagccagtcctctgtttacaagcaaaacatctaatcgttctttcaaaagtcattcctttccgcaccgctttcctgtgcgtgcagttcttcatatgcctctatggtgcgctccgtgatcgtctccgcatcgattccgacttccctgcgcagaatctccacattgccatgttccacgtactcatccggaatcgcgatggcaagcactctcacagagagattgtgctcctcgtaaaaacgcatgacctgttcgcccatgccaccgctgatcacattctcctccatcgtaacgataaggtcgtgatgccttgctgcggacaggagcgcatcctcatccagcggctttgcaaaccgcgcattgattaagctgctctcatagccgagcgccttcagccgctcatgcaccgcctccgccgtcttcaccatcgcaccaagtgcaaacagcgcaatctgacccgaccggtagatccactcactcttgccgcaggcgatcggcgcccggtactctcttaatccgtcatacgcctctcctctcggatatcttatcgcaatcggcgcggaaaaatcaactgcatatttaatcatatccgacagttcccatttattcttcggcgccataatggtcatattcggtatcgttgagagataggagatgtcaaaaattccctggtgggtctccccgtcgctgcccacaagtcctgcacggtcgatcgcaaataccaccggcaggttctgaatacagacgtcgtggaggatctggtcgtaggcgcgctgtaaaaaagatgaatacacggcaaagatcggctttaagcctcccgccgcgagccccgccgcaaatgtcaccgcatgctgctccgcaatgcccacatcaaaaaagcgctccggaaacatattgtggaaacgttttaatcccgttccgtcggtcatcgccgccgtgattgccaccacgcgctcatcacggtcgccaagcttgcgcatcaccgtggaaaaaacatcggtgtaatttgcttttgtccgcggatgcttcggaagtcccgtctcgatatcaaacggctccgtcccgtggaaccgcgccggatgccgctcggcaggtgcatagcctgttcccttgtgcgtgatgacatgcaccagcaccggtccatccacacgcgacgcttcctgcagcagctttaaaatacccttgatatcgcctccgtccaccggtccgagataaataatccccagttcctcaaacagcatccccggaatgaacagctgcttaattccgctcttcgtgcgccggatacgctccaccatcttatcgccgtagaccggaatcttgttgagggaattcatgaccccgagctttaaatcccggtaggcatccgccgtgcggaacccagccaggtaggtggacagtccgccgacattctccgagatggacatattattgtcgtttaggacaatgataaagttggagttaagctgtgccgcattattaagcgcctcaaacgccatacctccggtcagcgcaccgtctccgatcaccgacaccaccttgtagtcctcccccgtgatctctctcgcatgcgcgtaccccagtcccgccgaaatggacgtggaactgtgtcccgtgtcaaagcagtcacattcgctttccttgcgcttcggaaatccgctcattcctccgtacttgcgcagctggtcaaatccctcttttcttccggtcagaagcttgtgggtataagactgatgcccgacatcccagatcagcttatccttcggcagatccaaaaacagatgcagcgccatggtcagctcgatcacgcccagattagacgcaagatgtcccccggtatccgagattttctcgattaaaaattgacgaatctccgatgcaagaattttcagttcctcatcggagagttccttgatatcattttctttttgtatacgttccaagatcatacagagcacctctgctttttatcgtagtttacttctcccggaggatcagatatctgagcagttccgtcagatattcgttcttaaccacaagggaatccatccgcgcaatcgcctgctcggatagtgacgcaacatccgccttcgccttctcaatgccctcataggtcacgtacgtgatcttgtggttcttctcatcgctgccgatgggctttcccaatacctccatggtgctcgtgacatccagaatgtcgtcctggatctgaaatgcaagtccgacctcaccggctgtctgctcgataatcttctgttcaccctgcgtggctcccgccagcaccgctccggcgagcattgccccctcgatcagggcgctcgtcttcagacgatagataaaatcgagtttttccttggtcatgtctggctttccctccgactcgacatccacggtctggccgccgaccatcccatagatccccgcctttgcggtcagaatctgaaatgcctggcataccccgggattgcccggttccatggcaaatgcccgtgccgcagtctcatatgcataattcagaagcgcatctcccgcgaggattcccattgcctccccgtacacggcatgcgtggtcttcttcccgcggcggtattcgtcattatccattgccggaagatcatcatgcaccagtgagtaggtgtgaatcatctcgatcgctgccatgaacggttcgatcacctcggatcttcctccaaacaggcggtaagtctcctgcatcagcatcgggcggagacgcttacctcccgccagcacgctgtaattcatcgcctccatgatggtcttctgatagccttcttcctttggcaggtatttttttatgatctgttcaatctgcgctgtgcgctccgccatctcggtcttaaaatccatcgtctgcatccccctaccgttcttacatctcttctatttccccgtcctcaccgaggatctgcatctttttttccacttcgtccagaatggttccgcaattttttaattgcaataccccctgctgatacagcgaaaaagattcctccagcgaaatctccggctgttccatctgtgtgaggatcgcctcgatccgggtaaaagcctcctcaagcgtcggctttttttcgttctgattatccatcgattcttcctttctccaaaccatcctctgcggcatcctgcttacggatctctgtcacagccgcttttaagctgccccggtagagatgaatggaaagcgcttctccgatctgcacggtgtccgcatccgtcagcgcatgtccgccggcatcctccacataggaatacccctgcgccagcttcttaagcggcgacatcccgtccagtcttcctgaaagaagtgccagcgtatggcgcttctgttcaagcgttgcctgcatccggcgctctaaggcggcgcccagctcgtccaaacgcctttcattctctttgagcttggcgcgcggattcagatagcgcagcttctcctcatcatgcatgagacgcgtgcgcatctggttcagctttaattccagctggcgtctcatctgtgttccgtaatccatcagccacttttcgacgagctgcacatcaaacactgcaagttccgccgccgcggaaggtgtcggtgcccgcagatccgccacataatccgatatcgtcgtatccgtctgatgtccgaccgccgagatcaccggcgtgttgcatgcaaaaatcgcccgcgcaacctcttcttcattgaatgcccacagatcctcgatcgaaccgccgccgcgtcccacaatgatgacgtccacacccagcacatccagcgcatggatgccgcgcacaatgcttgctgcggcgccgtccccctgcacgagcgcgggatataagatcaactgcacatagggattccttctggccgcaatgttgcggatatcctgtatggcggctcccgtaggcgctgtcacaatgccgatcctcgtggcatatctgggtatcggctttttgtatgccgcatcgaacattcccatctcctcgagttcgcgctttaacgcctcaaacttcagatagagattcccggcaccctcaagctcaatctctctggcatagagctggtactttccgtcccgctcgtacacctcgacggagccggtcacaacaaccttgtctccctccttcatctgaaaggcaagtccgcggcggtacctggaaaacatgaccgcggcgatcgtccccgtctgatccttgagggtaaaataaatatgaccgctggagtgatacttacagttcgacacttcccccttgatgctgatctggtgcaacataaaatcctgtgcgaacatgttctggatgtatgtatttacctgaccgacagaatagatattttttctcataccagctttgcaagtacaccgttgataaatgccggcgactcatcggtgccatactttttggcaagctccaccgcctcgttgatggcaacgccgaccggcacatcctcatcatacttcatttcatagaccgccaggcggatcagcgtgagatctacctttcccatgcgtccggtcttccagccttccgccacagcatcgatcgcctcgtcaatctctgcaagatgcgccacgatatcctcgcatttgccggaaatatacgcgccgtcctttgcatcccacggctcctccgtctcctcatagacggcaatctgctccggcagttcctgtctgtcatggaactccacgccaaacagcagcttaaatatctgttctctcaactctcttctggtcataaacctttcctttctctcatgttccgtcttcttcgtcacatttccctgtacaggaaaaaaggatgtcgcagggacatcctttatcttattcaccgtgattcgatgcgttacttgttgctgcccatgtccacacttgcgatacggatattcacgatagatacttccagaccggtcatattctcaatcgcattcttgactctgtcctgcaccttggctgacacttcagggatcgaataaccatatgaaatgttcagtgccacatccacgcttacctttccgtcgagaacttctacacgaattcctttggaaaggttcttcataccaagcttacttaccagttcatttgtgatgttgccagccatggaaccaacgccctcaacctcggtagcggcaagtcctgcgatgatggcaaccacttcatctgcaatcttcacttctcccaaattaccgtcctttattttaaatgttttgcgatcctcacccatgtcaaatgcctcctaagtgatattatgcgtttattataacagactattcccgttttggaaaccaaaaaaagtattaaattattcggtcacaccgagttcctgaaaatcgcatccgtcatcaccgcctggggaaacaaaggcatatgcgctcgtcgttcccttccatgtgacagaaaagcttccctccagatccaggaacgaatgtgcttcagcaatccccgtcacaagctccgccatatcctcgataaagctctccgccatcgccgggttggtgcactccttctcctcgatctcctcctccacgaaaaggcgcagcacaaaatcatccagatcgctctcgtcatcaagttctgccctgctgatataaagattattacagctctctaacacacgcttcatgtaggaagcacaggaaaggatccgcgactgcgacacgtcctccgcctccaggaaaatcttgtattccatcttcattgtatctgccatcttatgtcctcttttccgtgccttggcaaacgccgcatcactttcctataatctccgccgtatcaatgaactcataaggagtctgctgatagacgtagtaatttaaccagttgctgtaaaggatattgccgtgcgagcgccactgcaggttcggctttttcgtatcgtcatcgtccggataatagttgaccggcggctcaatgggaagccccttctccttgtcccgcttgtattctttatccagcgtgtagcggtcatactccggatgccccatcacaaagattcttctgccttcgtccgcaatcgcgaggaatacgcccgcctcctcggattccgcaagaatggtcagttctttgaccttacggatgtcctccgtgcgcacctcggtatgtctggagtgcggtgccataaagcaatcgtcaaatccgcgcaccagcggcactttccggttcatcacacggtgttcatagacgccgaactttttctgcggcagaagatattttttcagtccgtagtgatagtacattcccgcctgtgccccccagcacagatgcagggtggacgtcacatggctcttcgtccactcaaagatctggcagatctcctcccagtaatccacgtcctcgtattccatctgctccaccggtgccccggtgatgatcagcccgtcaaaatagcgtctcttaatatccgcaaaactctcgtagaatttattcagatgactcatcgacgtattcttggactcatggctggacaccgcaacaaatgtcacatcgacttgaagcggcgtgttcgacagggaacgcagaagctgcagttccgtctcttctttcagcggcatcagatttaaaattccgatcttgatcggtctgatgtcctgatgcatcgcacgattctcatccataacaaatatattttccttctccagtatttcctttgcaggtaaatcactctgtattctgattggcataaaaatgttacctctctatctgcagcatgtcgtacagttcgtcctcactgatcactctgatgccgagttcctgcgccttcgtaagcttgcttcccgcgctctcccccgcgaggacataatccgtcttctttgacacagatccggatacctttcctccataccgctcgatcaacgtctgcgcttcctttctaccaagcgtcggcagggttcccgtcaccacaagggtctttccgctaataacagagtccacggtctcgctctcctccgccgtcatgttgacgccggcctgtgcgagtctctgcagcaccacctggttcttctcatccgaaaaataacttcggatgcagtccgcactgacttttccgatgtccccgactgccgtcaattcctcctcggatgcctccgaaagccgctccatggtcttaaaatgcttcatgatcgccttcgctgccgcctttccgacattcggtatcccaagaccggtcaacagcttgtacgcatcattctgcttggctttttctatcgcctccagaagcttgtccgtgttcttctccttgccgatgattccctgtgcaatcagttcctctcggtgctccttcagcgaaaaaatgtccgcgacatttttaatataacccattctgacgagttcttcaatataaaccgttccgaaccccttgatgtccatggcgtctcttccgacaaaattgatgatgtggcgctccagctgcgccgggcagttcggcgatgtacacttgatgtccgccgtatcgcgttcccgctctgtcttcgccccgcacaccggacagacatccggtatcacaaagcgcttccagccctccgggcgcttttctttccgcacttccttcaccttcggaatgatctcgccggatttgtagacgacgatggtgtccccgattccgacatccagatcatcgataaagtcctgattgtgaagcgtcgccctcgaaacgctcgttccacagagccgtatcggctcaaataccgcagtcggcgtgatcctgcctgtccttccgaccgacagctcgatatccaaaagctttgtctctttttcctccggcggatatttgtaggcgatcgcccatctgggcactttcgaggttgccccgagcttctctcggtccgagaaacggttgatcttgaccaccgctccgtcaatgtcatagccgaggttgccgcggttctcgccgatggcggtaatcgcctcccacacttcatctgccgtcttgcagacacggtaatcatcaatcacatgaattccctgtttcttcagatattcatatccctgtgtgtgcgtgtcaaactgcattccccgcacctgctggatattaaatataaacagcgacagcttacgctctttcgtgatcgcggaatccagctggcggagcgtgcccgccgcacagtttctcggattggcgaacggctttttcccgagcagctcctgtttttcattcacggcatcaaaatccgcattcttcatgtagacttccccacggatctccagatactccggtgcctcccggagtttctttttcacgtcgccgatcacctttgcattcgccgtgacatcctcgccgaaattgatgccgtcgccgcgcgtctccgcgagcgccagctccccgttctcatagcgcagcgtcatcgaaagtccatcgatcttatactccacgacaaactccggatcgtccagctgttctttcatctgtgccacaaaatcatagatctcttcctttgagaacacatcctgcaggcttagcatcgggacattgtgccttactagcacacccgccgtccgcttcgctgtgccgcccaccttctgggtcggtgaatccggtgtgaccagctcgggatgttcccgctccagccgctttaattccagcatcagctggtcaaactcgtaatcggatatctccggattatcctgattgtaatagcggtcactgtgatacgcaatctgttcccgcaggtttttgatctgttcttccggtgtcatctctttttctcccccgtcttttttgcaggcatcaccggatcgctggacgaatccgcggtcaggcggagcaattcgtgatactcctcctccgtcacattccggtatgttccactctttaaactgcccaattcaatattcataatacgcacgcgcaccagcttttccacacggtagccgaaatattcacacatcctccggatctgccggttcaatccctgcgttaaaatgatccggaactcgcgcttgccgatgcgttccacaaagcaccggcgtgttgtcgcattcagttccacgagcggcacgccgcctgccattccgcgcagaaaagactccgtgagcggtttgttcaccgtcaccagatattccttctcgtgcatgtttcccgcccgcataatcttgttcacaagatcgccctgattcgtcaaaagaagcagcccctccgaatccttgtcgagtcttccgaccgggtagatgcgcttcggataatgaatatagtcgatcacattgtttttctcgcgtttttccgctgtgcagacaattcccgccggcttgtgaaacgcgagcaggatgcgttcttcctcctggcttacgcttctcccctgaaagcagaccgtctgccccggcagcactcttgtcccgggcctggcgcagactccgtccacggtaaccgcccccgcctcgatctgacggtccgcctcacgtcttgaacacacccctgcctcactcagatatttgttgatccgcactccctgttcgtccataatctctccgtttcaaatgttctctctgtgaaaaaacggagacttccttttaaaaagtctccgttttccggtatcagccaggccgcaccgcttactgtaataaagatgtctttatgtaaccggtctcgccgttccattttaccttggtccagccctccgcataactcatcacaactgtgaccttctctcccgcataagccgttccgactttgctggaatcctcgctcattcccgagcggatattcgtggtattctccagcataatcaccgttccctctgcgatggaagcactgtttgtgctgtcgctgttatccgatgaactgtccgaattattctccgccgtcgtatccggcagatcataggtcaaaaactcattcttgacataacctgtcgtaccgttgtaatcaatcacgctccagtcgccgtccaccgctgtacgggtgacaacggttccctgatctaaggtgccaagcttttcagattccgtatctgctgcggcacggacattcacacgatccttcgtcgcaagcgtctctgtctgctgtacggtctcttcctgctgctctgtctcctgcggttgctcggtctccggctgttccgccgcctcggtcgcttcggtctgctcggttgccgcctgtgccgccacctggctcacccagtccttgattgctgcaggaatcgtcgtctgaatcatattcgccagattctcatccgccgcaagcgcctcatcgtatctcgtctgcacctcactctgcagctccaccacatccgactcgctctcaaactgaccgatcaggctctgtacgctggtgtcaagcgcattctcctgattggcaaggttgtactggctgtacaggttgtcaatataaagcgtgccgtcatcgttcgtacggacatagaagaaatccagtcccggcgctgtggtatccactcccgtaaacttgatctccatcgacacggaaaccagataagagttcgcatccagccctgtcttggtgtagcacttgatattctgatattcatccacatactgtgaaaataatccgatgtagctctgctcatttgcagaaatcggtgttgcaatcgaggaaagtgtcgtaacatctcccgccgcatacgccgtgtaatactgtgtaatcagtgcgttgatattctcattggcatccacctgataggcttcttccgtcgcctgcgtgctctccgtcgcgttcgcattcaccacaacatcagagtcggatcccttcggcttcgcacacatggcaagcacgaggattaaaacgaccaccagcgctcccgccgcaaaataccggatgtgctcccggataaatcggagaacctcattctccttttttctctgcttaatcggcgttctcttcgtctccttctcctctgtcttatgattctctgtatgattcaaactggaattctccattgattctccaccgtacctttcccaaacaattcgtcatccgctgcactaccgcatcatctgtgtgcatatctgcaggcacagatgttccaatctgacagtctctcgcctgtcaaagattctctaatattctatggcagagcaatctgctctgccatatctgtcaaaaaaatgcacccggcgggaatcgaacccgcattgccggagtcggagtccggtgttctatccattagactacggttgcccattgcgcatctctgaaaaactcatatcgcaacgaacatatactagcacattggcattttgtttgtcaacgcttatcccaaaagcttttctgaaaattgtgtgaactcacacagtaacggtatctgcggtggtgccatccagtgcttttttgtctgccgtaatctgtgcaaacagttccttctggcgcgctgcatcatcccccgggatccgcagtgcgatcagaagcgcggtgtccgtgattccctgttcctttaaaaagacggcatcctcttttttctgcagaccgttacggtagcggtacacgatctggtccagacggtcaaacatctgcatcagctctttgaaacgattttcgcgttctaaaaggttcgtcccgtaacgtgtctgctccattcccgccgttgcgatcacctgcatgcaaagccggagttctcccgtcacatccgacgcctccatcaaaacgtccgggcgctcctttctgcgctcaaggaaatacgccttggcgccgtccacatcgcgtcttgcaaaatagccggcaagctgctctttcatctctctcgtctccgccttctcaccgatcatccccaccttgcactcacacaccgaaagtccctgcaccgtcacccagaccagcagcaggaattcggagataaatccgaacacgcgcttatggtaggcatcctcccccgtctccagacagatccgtttttccacctcggcaaatatggaaaagagccagctgcagtacgaatcataaagctccttcgacgtgacaaacatattcccgaaatacgtccttgtgccatgcaccagcctctcaaacgccggataatatgccggataacgttcttttatcacctctcccgccgcatccagtgcctttttgttatgattggcgcaaaaaccgtaatagtaggagttattgagtgcaacctgcttcgtcgtaatcagatcgtactctgataaaagcttttcgtaatcgtcctccataagaatcctctcatccgccccgagcagatatctccggtaatgacaggtgcccacataatccacatcgtgacagtttttccacacccagtagagcccggtcagctcactgtaatagcaatttttgtcggaaatattctctccggtatcatcccccggatagcccaggtcttccccgcacgcgcgtcccacatggagcggacgaaacagcgggctctgcggcatctcaaactttttatgtgtcatgacatagatacggatcttcattcttcctccaggaacatatgtttgtattttcatttacttttgttcacttctctgctataatacaccatcataaggaggattaccatatgccgcagccgctcatttatcacattgacgtcaattccgcatttttaagctgggaagccgccgaacttctgcgccaggatccggacgccccggacatccgctcttttccttccgtcatcggcggcagcgaaaagacacggcacgggattgttctcgccaagtcgccctccgcagccgcgctcggcgtctgtaccggcgagccgctcgcccaggcaaggcgcaagtgccctgatttaaaaatctatgccccgcactacagcatctatgtggagcgttcccgccagttcatggcacttctcaaagaatatgcgccctcggtggacacctacagcatcgacgaggccttctgcgacatgacaggcacctcctcgctctacggcaatccggtggactttgcccacaggctgaaggacgagattcacacccggctcggctttaccgtgaacatcggcatctcctccaaccggctgctcgccaagactgcctccgactttgaaaaaccggacaaagtacacacgcttttcccatccgaaatggaagaaaagttctggccgcttccgatcgaggatctgtttttcgtcgggaaatccaccgccctaaggctccgctccctcggcatcacaaccatcggccagctggccaaaagcgatcacgccatgattctctccgtctttaaatcccacggcgacaccatctggaattatgccaacggaatcgaatccacaccgctgtcccacaacgacgccgcaagcaagggattcggcaattccctcacgctccagtacgatgtgacggataccgcggtggcaaagcatgtgcttctctcgctctgtgagacggtcggtgccagaatccgcgctgccggcgcctatgtcagcgtggtgcaggtgcagattgtggacaatgatttccgccacacttccagacaggtaacgcttgcttcctccaccaacgtcacggagaagctgtacacctgtgcctgtgagctcttcgacgagctctgggatcaccgtccaatccggctgctcggcgtctcgaccggcaaggcgacgcaggaacactacgagcagtacgacctgtttgacatgcagaagaacgagaagctctcccgcctgaatgtggcagtcgacgccatccgctcccgctacggggaagattccatcaagcgcgcctgctttatcgaagcggacgatgcagcgcccgcgctctcccacatgaccggcggcatgcagcgcgccaagcgcaatgcagcgcatccggcagacgcggcgtccgatccggcacgtccccgtaatcgccagccgtaacggaaaaggatgggggatgaggaatattccgaaaaacagatacctgaaagttccggatagaacggacggcagcaaattctttgaagcaaaattcgtgtatttcttccatgccacgtccggcatcccatttcgtgtcttggccacgtttggacactcacggagtgtgtccgacaagctgcagacaatgagcggactttctggtgtccctaatggcacctcttcacagacaatataaaaccgcgcgaaccgaaactcgccggcatctgctattgaaaataaggcagatgccgactcaaacatcggcttcgcgcggttatgttctattcagaggtgtcataagggacacacacaaaagtcctaaaattgtctgccggcttgcgaactcattccgtggagtgttccaaacttggaaagacacagatcatcgaagatgccaggcgcggcgtggttaaaaataccggattttgcggtcagaattgccgccgtccgttctattccggagctttctgttcccgggtgttcctgtaatattccttatccctccttgccgtacggcagtccgctttcggagcatgccgtctcttatgccacggtctcctcgaactgcgagttatacaggttcgcataaaagccctgctttttgagcagttcttcgtgtctgccctgctctacgatgtcgccgtccttcatgacgaggatcatatccgcatcgcgtatggtcgacaggcggtgtgcgatgacaaagctggtacgccccttcatcaggtgatccatcgctttctggattgccacctccgtgcgtgtgtcaaccgacgacgtcgcctcgtcaagaatcaggatcttgttgtctgcaagaattgctctggcgatggtgagaagctgcttctgcccctgtgagacgttgcttgcatcctcgtttaactccatctgatagccacccggcagtgtgcggataaagtggtcggcgtgcgccgccttcgctgcggcaatgacttcctcatccgtcgcatccagcctgccgtaacggatattttccatgatcgttccctgaaacagccaggtatcctgaagcaccataccgaatgcctcacgcagatcccgccggttaaagcttctcacgtcatgaccgtcaaggcagattgcgccgctgtttacatcataaaaacgcatcagaagtttgaccatagtggtctttccggcgcctgtcggtccgacaatggcaatcttttgtcccggagccacatttacgctgaagtcgtgaatgatcgtctgatccggctggtagccgaaatgaacatgctcaaacgataccgcgcctgtcaccttggaaatatcacaaggattctccacggactggtcttcttcctcctcattcaggaattcaaacacacgctccgaagccgccgccatcgactgcacctggttgatgacctgtgcgatctgctggatcggctgtgtgaaacttttcacgtactggataaacgcctgaatatctccgattgtgatcgttccccggatagcaagcagacctccgctaagcgcaacggctgcatatccgagatttccgacaaacatcatgatcggctgcatcataccggagagaaactgtgacttccatgccgattcatacagcttctggttcgtcgcatcaaactcctcgatcgtatcctgctctctgttaaatgccttaatgaccagatgtcctccgtaaatctcctccacctgtccgttgatatgtcccagatattcctgctgattcttaaagtatttctgcgacttcttcacaacgaaggaaatcagccccgcggagaccggcaggatcacaagcgcgatcagcgtcatgagcggcgagatgctgagcatcatgataaatacaccgatcagtgtcgcaaccgaggtaatgatcgtggtaatgctctggttgagtccctgtcctaaggtatccacatcgttggtgattctggaaagcacctcaccgtaggtacggctctcaaaatacttcatcggcatccggttgatcttctccgagatttccttccggagctggtaacagatcttctgggtcaccccggtcataatccagccctgcacaaacgaaaacagtgcactgagaagatacagccccaatacaaacagcaggatctttcctatataagtaaaatctattccgcctgttccgcggatcttcgccatcagtccttccgagagcgctgtcgtcgcttttcccagaatctttggtccgattacgctgaacaccgtggagcacgccgcaaatactgcaacaataacgattgcaaacttaaaatgccggatataggatgccagttttccgatggctccctttaaatccttcggcttctctcccggcgtcataccgcgtccgcccatcggtccacggcgtctgcccattccttttgccgtctcatttccgttactcattcacagacacctcctgttcctccattccaagctcttttgccgacatctgggatctcgcgatctcacgataagtttcacagccgcgaagcagttcctcgtgtgttccctttccgacaatgcgtccatcgtttaataccagaatctgatctgcatgcaggatcgtgctgatccgctgcgcgacgatgatcaccgtcttgtcggcaacctttttggcaagtgcccggcgcagtgcggcatccgtcttcagatccagtgcggaaaagctgtcgtcaaaaataaaaacctgcggctgctttgcgatcgctctggcgatggcaaggcgctgtttctggcctcccgacacattgcttccaccctgtgcaatggcactgtcatatccttcttttttctccgcgataaaatccgatgcctgcgcaatctctgccgcctcccggatctgttcatcggtggcatcatccttgccgaatcttaaattcgatgcgatggtaccggaaaacagtactcctttctgtggtacaaaaccaatctcctcccgaagttctgccatggcaagcttccggatatcaatgccgtccatggtaatgcttccgcccgtcacatcataaagacgcggaatcaggttcaccagtgttgactttccgcagccggtactgccgatgattgccgtcgtctttcccggctccgcaacaaagtcaatgtccgagagcacatcctcctgcgcgttcgggtagcggaagttcacatgggaaaaacagatcacgccgcggtgttctttaattttctccggctgcattggttccgcgatcgaagactgcgtgcggatgacctcatcaatacgctccgcagccactgccgcacgcggaagcataatcgacattgccgcgagcattaagaatgccatgacaatcatcatcgcatacgtgataaacgccgtcatggagccgacctgcatagttccctgatcgatcttatgtgcgccgaaccacacaattccaaccgtaagcacattcatgatcatcatcattcccggcatcataaatgtcatgacgcggtttgtaaaaagcatggttttcgtcagatcgcggttcgcatcgtcaaaacgctgctcctcttttttctccctgccgaacgcccggatgaccgaaagtcctgtcaggatttcacgcgccacgaggttgatgcggtccaccagtttctgcatcagcttaaaacgcggcatcgcaaccgccatcagaaccatcacatatcccagaattacaagcactgcaagcacaatgatccagcccataccggcaccggtctgcagtacctttaagattccgccgattccaaggatcggtgcataagctaccatacggatcagaatcgcgcatgtcatctgaatctgctggatatcgttcgtactccgggtaattaacgaagctgttgaaaaacgatccatctcggcattggaaaagcttaccacccttttaaatatttttccgcggagatcacgtccgattcctgcaccgatgcgggcgccgataaagccgactaagaccgtggcaatccccataatcagagccattcccaccattttcaaaccggctttccacagataagacttctgaattgcttccacatccacgcctgccgccgcatcgcagcctgccgcgtacgccacgcccatcgatttgacaagcgaactgcccatggcatcgagcatcgagttgagttccccgcgcattgataaaagctggtctttttccagcatgccgccggataccatcgcctgcagcagatctctcatatccacacaggtgactgtcgtcgtatttccgtcctcgttctgcgtctctttttcaaatgtttttaattccacgcccatggacgcgccgatctgctcgatcgtcattccgtccagcgcagactcatctgtatgcatctgctctgccatcagtttcttaaatgtactttcctccatagcagacatctgataattcataagaagcggtacgagaaacgtatcatccagttcctccagccgttcttccccggtcacattccgctcgtacacactgccatttaacgcatagctttcctcccaggatgccgtctcttcatccgtcatcaaaagttctgccttctcatactcctccggtgtcaatgcctccggcaggatgtgttttattccctgattctgaattccgacgtcaataatgtccgatgtgtatgccggcagtgacagatcgcaccacgcctgcacaaacaacagcaataacaccaggatcagcggtttccagtatggaatcatatttttaaaaatctttcccatgttgtccttcctttctgtttcgcatacttctcttctcgatttcttctgctgcaatgtcatataattcatccaggcatactatgagctttttgagatcctgttcatccatctgcgaaatgactgccctgccaaattcctgcatggtgcatgtcatattttgctgcatgtcctccccactctccgtcagagcgacacaggtattgcgccggtctttcggatctgtcattctgcagatccagccgtgatcctccagattcttcaaagtccttgacacagcagaattctgggtatgaagcttctctgccagttcagacactgtagctctcccattattcttttcctggttcaactgtgaaattgcccagagcatcatgccgtcgctttttgtcatatcggaaaacagttctccgatccgcagttttccgaaacggttcatcgcccgaaataaacccgcatacaattcttccatatttcaccaccttgttaattattaacactgttacataatttgggacattataatagcacagggagattgctgcgtcaagcaatctccctgtgtttatctttttttaataattctattgtatctggctgctggcatgaatcgtatccagcatctgtctgagttctttcatggcgaactgtcccggcgcactcggcttttcgtgcgcgccgaatgtgacgcaggagccgaacgtctccccactgatcctgctgatgccgccgagtgatcccatggacatcgtaatcaccggcgtatccggattctcctctctaaactgtgccgtcacatccagcagattgagcacgtctttataattctgcggcatcaccgcaagctttacaatatccgctccgccggcgcacattttctccagcagcatcttcatgacttccggagacggcgtctgctcaaaatcgtgatgtgaggcaatgaccgacactcccatctcccgcagcctttttatcttatggagcggtcggtcttcctcaaagaattccagatccaccagatcgacacagccggattccgccgcaagatcgtgcagatcgtcgagctgttccgctttcacctgcgccatgcctccctgatgcgcggtacggaatgtatacaggaaaagcttctcccccagcagaggcgccacagcctcaaatacgctccggattgcattgtaatctgtaaaatcgcggaatgcatctactctccactcgatcatatccgcggtgccctgactcagatacgtgatctcccggatcaccgactgtgcatcctgctctaccacgggaacgcagatcaacggttcccctcccccaatcacacggtgttttatctccaatggcttcatgttcctgctccctttccatacctgcatttttttcatccggaccacttccaggcacggctttttttacagtttactccattctgaataaatatgcaaatatttgacatctattgtaatatcagctaagataattacgattcaaacagaaaggagtgtgcggtgtctttttccttatccacacaatgtcatatgagttttacatttttaaacgaactgccgtcaccggccgaaatcaaacaaaactatccgctttccgacaagctgaaagcgttaaaaaaagagcgtgatgctgcgatcagcgccgtcattaccggagcagattcccgttttctcgtcatcatcggaccttgctccgcggacaacgaagattccgtctgcgattatgtcagccgcctcacttccattcaggaggatgttgcggacaagctgattctgattccgcgtgtctacaccaacaaaccacgcaccacaggcgaaggttataagggtattgcctcacagccggatccggaaaaagcgccggacatgattgagggactgatcgccatgcgcaaaatgcacattcgcgcgatcgaggaaagcggtcttacctgcgccgacgagatgctctacccggagaactggggctatgtggaagacctgttgtcctatgtcgccatcggcgcgcgttccgtcgaggatcagcagcaccgtctcaccgtgagcggttttgatgtggcttccggcatgaagaacccgaccagcggcgacttttccgtcatgctcaattccgtctacgccgcacagcacccacaccacttcgtataccgcggctatgaagtcgagacaaccggcaacccgctcacacacgttgtgcttcgcggcgcggtcagcaagcacggcaacaccacacagaattaccactacgaagatctgatccgcctctgcgagatgtaccaggaaatggatctcgtcaatccggctgctgtggtcgatgtcaaccactccaattccggcaagaaattcaaggagcagatccgcatcgtaaaggaagtcatgcacaacagacaggtttcctccgatatcgaacacatggtaaaaggtgttatgatcgagagctatatcgaggaaggcaaccagaaaatcggcgatcacatctatggcaaatccatcaccgacccgtgccttggctgggaggattccagagatctgatctataccattgcagatatgtgccgctaacgcacgttctgaaaaagaatctcgcttgcgggattctccgcgcgcgagcggttcgcaaagcgatatgttccttaccgcgagctgcgcatcctcgcggagcgttttttatttcataggaaggttctactttcacacatgaatgtatcacggtatttcctatgaaacaaaagaggtgcaaccacacaaaccatgtggctgcacctctttttatgttcttttctatcttcttttttatattctttttctattatatattctcttttatatcccgtcttcttatccgcgcggatgcgccttcagataaacctcccgcatctgcagatctttcgcctgcgcatatatctgcgttgtggaaatatccgaatgtcccagcatctcctgcaccgattttaagtccgccccgttgccgaccatatgcgccgcaaaggaatgtctcaacatatgcggcgtaatctccgcttctattcccgcctttttgccgtagcccttcatcagcttccagaatccctggcggctcatcggctgcccggaacagttcgtaaacaggcggtcttccttctcatctgatataagcttcggcctgccctctgcaagataagcttccagcgccttgcgcgcaatcattccaaacggaatgatccgttccttatgtccatccgagcaggtcagatactccatccgcagattcacatccgacaccctcagtgaaatcagctcggacacacggatgcctgtcgcatacaataactccagcatggctttatcccgcagttccttcggcgatgtacctcccggctgttccaaaaggcgcgtcacctcttccgtcgtcaatactgtcggcattttcttctcaatccgcggcgcctttaaacgctcggacggatctactgccagtctccgctccttctccatataatgatagaacgccttcatggacgcaatgcttcgcgagatcgtcgcaggctttcttccttccttttccagatagatgacgtaggatgtcagacttgtagccgtcacctcattcacatcgcagattccctgtgccagaagatactgattcattttcttcaaatcacgcgcataagaaacctccgtgttctctgaggtattcttctcctgatgtaaatattgaatgaaattctgtatgtcctgcgtcataacgtttacctgccccgccactcatttgttcactgcattgctccgctgtatgcggctttcttctctgtcgaaaaatgtaccgcaaacgcggtacatcattcattataatcagaaccaaaccgaaaagcaatcgcatttttcccttataattcgggcatttagagcgaaactacaacatctcgtttcccttattttctccgtaccatatattgtaatcattttaaaaattttagcaaaaaatttttaaaacccaggcgaatactgccggattgacaaagctctccacaaacgttcccaataacacacagcctgtcacaagccccgcttccgccagctgccgcgtccgatcctgccagctgttccatcccacgattctgctctgtcttttcttactgttcgcatagaaaagcagcgccgccgtataaaaaatccactgcggcagcaatccggcaagaatgatcaggcagccatatcctccgtattccataattccgacaacaagcaagaatccgaatcctgctgagagcatgctctttgccagcacggaaaacacctttccgtcaaccgctcttccaagcaaaaagatgagaaccagcatctgcatgcgcaccataaccacatgaccaaacagctgattcccatccactttttgataagcatactgttgcagaaatgtctgattcagcagttgtccatgtatctgccgatttgcgccaagcagattggtcagaacaattccgcccagaaatgccagcatcacaatacatccttcccgcttcaaacattgcactccgctcatatcttttctgtattatatttatgcggatctcctagtcctgattcagcagattcttatatgctaaaattccggcaaccgttttggcatcctggatggttcccgcatagatcatatcgcacaattcatccaccccgtaggcggcaacatcaataaattccccctcatcgagatgctgatgtccgggctttaaattttttgccagatagacatcaataaactcgtcacagaatgcgactgtcgtcttaagagataagattctggtcagatcgtcgctgcaatagccggtctcctcctccagttcccttgctgcacataccctggtatcctccgtcacgctgtcgcgcgaacctgccggaatctccagagtcatgcggtcgatcgcattccggtactgctttaccatcaggatctttccatccccgcgcaccggcacaacggccgccgctcccttgcggtgtgagataaagtcccatgtctcctgctttccatccggaagttccatggtatcctcatacatatccagaattgcaccatgttttattagttctctcttgactctctttacctgctgatccatattacccatcctttctattctgcatctgatataacatccccgccttcgccgcaatgcggcctccgcgaagcattttgccctacaggaaacatcttccacgctttaacatcacacggtatttcctatgaaaaagaatctcgcttgcgagattctccgcgcgcgagcggtttgcaaagcgatattttccttaccgcgagctgcgcatcctcgcggagcgttttttatttcataggaaggttctgcattcacacatgaaggcggcacggtatttcctatgaaatgaaaaaagctgccgcttcacgatttctcggttatgcgacaacttttctctgctctctttgttatttcgcgtagtcggttactctcgattcacgaattacatttactttaatctgtcctgggtattccatttccgcttcaatcttcttggaaatatcacgtgccatcaataccatatctgcatcgctgacctgttctggaacaaccataactcgaatctccctgcctgcctgaatagcaaatgacttctctacgcccttaaatccgtttgaaatatcctctaactgttttaatctgtttgagtaggtctctaatgtctctcttctcgctccaggtcttgccgcactgatcgtatcagccgcctgtacaatacatgcaatcagagactccggctccacgtcaccatgatgtgcttccacagcattgatgataatcggtgattccttgtactttctacacaaatccacaccaatctgaatatgggaaccttccatatcatgatctactgattttccgatatcatgcagtaaacctgcacgttttgcagttctgacatccacaccgatctcagcagccagcaatccggataactgggctacttcgatggaatgcttcaatgcattctgtccataactcgtccggaacttcattctgccgagcaatcggacaagttccggatgaattccgtgaactccaacctctaaggttgcagcctcaccttcttcacggatcattgtctcgacttccttctgtgccttttcgaccatctcctcaattctggccggatgaatacgtccgtccacaatcagcttctccaaagcaatgcgggcaacttcccttctgatcggatcaaatccagataagattactgcctccggtgtatcatcgataatcagatccacaccggtgagtgtctcgagcgtgcggatattacgtccctcacgtccgataattctacccttcatctcgtcattcggaagctggacaaccgaaatggttgtctcagcgacgtggtcagccgcacatttctgaatcgctgttaccacatattcctttgccttcttgtccgcctcttccttggctctgtgttccatttctttgatcaattttgcagtatcaagttttacatcttcttcaacggtttttaagagatattcctttgcctgttcggaggttaatccggagattctttccagttcctgtaaccgctcttcattgagctttgcgacctgcgctttctgtttgttgatctcttcttcctttgcagcaaaacccgcttcgcgtctctcgattgactcaagcttcttgtccagattctcttccttctgtacaacacgacgctcgctgcgctgaatctctgcccggcgttcttttacttccttatccagatcgttcttcacacgaatggattcttccttcgcctcaagcattgcctcgcgcttcttggtctccgctgtcttcaccgcctcatcaataatctctcttgccttctcttctgcgtttccaatcttggcttccgtcaccttcttatggtaagcagatgtaacaaaatagaccacgatggcagtcactgcgatagcaacaacaacagcaatcactgtctccacaggagcacctcctttattaagttttcattgtacatataacacatataacataaaaatataatcgttatctgtcataaattacaacacataaattttattctatttcatgaattatgtcaagtgaataactgtacaatatgcataatattgcatttcatttttacaaaaatacaagatattgtactgaaatttattttaaaattcgtcgaaaaaatgctcttcgcgcatcactgcaagaatatcactgctcttaaaaccgcgcctcatgaggaactgatacatccgctgctgttccctgcggtctgcctgcgccgcatcgtagtgccgcttctctaaaagctccgcaatctgtgcccgctcatccgacacaaactcctccgcgagtgcctgctcaatctgctcccgccctaccccctttttcatgaggtccatctttaagcgctggctgctcttcttctgctggtgatagcggatatactgcttcgcataacgcaggtcatcgatatagtgatactgctttacatactccaccgccgccgcaacacactcctcgggataaccgttctggcggagcttttcacagagctgcgactccgtgcggtccatgcgctccagcagaaacagtgcacgctttttggctctctttccgacaatctccgtcagaatcttctcatatagtgataccggcagatacgcatcctccgtcatcaaaagcatgctctccgcctgcggcagtccccggatctcgctccggtagagtgtaaattcggttccgttgtcaaaccggaaaaacacccgtcccttctcacgtctggctacttcctttacctggacttcctgcatgatctgtctgttgcactcctatccttattctgccggcagttcttccggagtacgtcctgttgtctttcccgcactcttctcatccggctgttctgcagcctcatcttcctcagggctgtactttgcacgtaccttcgcttccacttcctcacagatcagcggattctccttcaggtagttcttggcattctcacgtccctggccgatcttctcgccgttgtaggcataccatgcaccggatttgttgatgatgccggcatccgccgccagatcgagaatatctccttccttggaaataccctgtccgaacataatatcgaactccgcctccttgaaaggcggtgccaccttgttcttcacaatcttcacacgcgtatggttgccgacaacctcaccgccctgctttaacgcctccactctccgcacatccagacgcaccgaagaatagaacttcagtgcacgaccgccggtcgtcgtctccggattaccgaacataacgccgatcttctcacgcagctggttgataaaaatgacgatacagttcgacttgctgacaatcgatgtcagcttacggagcgcctggctcatcaggcgcgcctgcagtcccacatgggaatctcccatatcgccgtcgatctccgccttcggtaccagcgcagccacagagtccacaatcacaatatcgactgctccggaacgcaccatcgtctctgcgatctcaagcgcctgctccccgcagtccggctgtgatatgtagaggttgtcgatgtcgacaccgatattcttcgcatagaccggatcaagcgcatgctccgcatcaataaatccggcgatgccgcctctcttctgtacctctgccaccgcatgcagtgcaaccgtcgtcttaccactggattccggtccgtagatctctatgatacgtcccttcggcagaccaccgattccaagcgccagatcaagactcaatgatccggtcggaaccgcctccacattcatgtgtgcagaattatcgcccagcttcatgaccgatcccttgccgtactgcttctcaatatgtgaaatcgccgcgtcaagcgcttttaacttctcttcctttgtcgtaggtctctcatcccttgtcagtttatcgtccttagccattctctttcctccatgcgaaccgtccgcgcacgaattgcgaacttatgttcgtttttctgttctaatagtagtatacttccgggaaaatgtcaaccacaaacccgaaaaataagtaacacctcaatgaattccgtggcggataccgcctgatgaccgctccagcagccctgattgcacagcaggacttccctgcctgcatgatttgataaaaagacgcccctccaaaaaacgggtatgccttatactaccatatccgccccatatccgcaatcacaaattaccggaaaaccggacattttctcacattgcttttcgttgtattcctgcaaatctgtgttataatgacctctgacaaaactacgatctgatttctggaggtatctatggaaaaactgttgttcttcggacttaccgacgctgaatttcaaaagataaaaccggttgcatcccggctgaaactgcactgcgagcagattcccgtttcgatgtaccacaatacgctcggcgcaatcgcatccggccgggcggttcctgccggcatccccgccgctcccggcacacctgtccccgccagcctcacggctgctttaggcgcagatgcccctgccggtgcctccgccgtttccgctgcctgcggcatacccgaagccggcagcactccggcagccgtctcccgccaccgtctgctcgtcatgtgccagctgcccgagcgccggatggacaagctgctgtttgaactgcgccgcatcgacgcccccatcgactacaaggctgtactcacgcccacaaacgccggatggacgattccacgtcttctcatggaaatgcactcagaaaaagccgcttacaccgcaaaaaaccgttaaagggactgtcgcaataagcatagctcgctttgcattgataagtaatattatcagaataccagagaacaaaaagttccagaataaacagacggcggcaaagtctttgaagcaaaattcacgtatttcttccatgccgcggctggcatctcattccgtgtctcttccacgtttgaacactcccggagtgtgtccgacaaaccgcagacaatgagcggactttctggtgtccctaatggcacctcttcacagacaatataaaaccgcgcgaaccgaaactcaagaagccggatattgcttgagatgagagtgtctcataagtcgccgtttgagtaagaacgtattaacaataataatagttgcagccgcagaaagcggcaggaagagaggaaaagaattatggctatggaattaaagtttgttgctccgaagatggaggaaactttcggaaagttgacttttgcaggtgtaggtgatgcggaaacggcatacatgaatgggcggacgcgtgttacgggacgcagctatcatcttttttctactcgccagcgtgcggatgatgttgtggtgacgcttccggcaacggtcggggaaaaacattttgggtatgacgagccggttgtgcttatcaatgcgcgtctttcggcgagtggtagaaatattgagggtagcgggtatacggattataagatgaccgcggatgatatggtgacgccggaagaggctgcaaagcttgcacaggcaggaaagcagtaggttaaggcgatcgaagagagttgtaagaataaatttaaaattatgcaaagccgcagggagcggcaggaagagaggaaaagaaatgagacttaaagagggaattgttgttgatgaggtaaagacttttgggaatttgaagttttcgggattgcgtcgtgaggtgtatgagcgtgatgaggagggaaacagcacaggtgtgttgattaagcgtggaagcacggtaacgtgtggagctgactgttactaatcgatcgagggcttgaccaaaaagtttgttggatgatttctgtatgaagttttgaaggtacaacttatttatgataggttttaccggaagctgtgtatcagctaatattcctcgatagctcagtcggtagagcacgcggctgttaaccgcgctgtcgtaggttcgagtcctactcggggagttttttttgactgtagaagtgtatttgtaaaactacctggctccatggtcaagcggttaagacatcgccctttcacggcggtaacacgggttcgattcccgttggagtcactagcttttggctggctgtaatcagctgaggtaaatatgccgatgtggctcaattggcagagcagctgatttgtaatcagcaggttatcggttcgagtccgatcatcggcttatagaagtaatctacttggaccattagctcagttggttagagcaaccggctcataaccggtcggtcctgggttcgagtccccgatggtccacttgtcacaaaagcgtttgtaagatgtctggcctaatggctcagttggttagagcgccgccctgtcacggcggaggtcgcgggttcgagtcccgcttgggtcgctcatgagagcaaaattgttcttatgataatttcatatgggatcttagctcagctgggagagcatctgccttacaagcagagggtcataggttcgagccctataggtcccacttctgtaacaactgttacagtaatgccggcgtggcggaactggcagacgcgcaggacttaaaatcctgttgtggtgacacagtaccggttcgattccggtcgccggcattcatatccaggtacttgacaagagtgctataatagatatgtaaaaaagaatatgtgtgcgtagctcagctggatagagcacttggctacggaccaaggtgtcgggggttcgaatcctctcgcgcacgtaggaaagcccggaagatcatcttccgggtctttttttcctctatagtatatatcttttgttttatctgaaaatcatatcgtagaaatgctttataaatccctcgattgaagcccaaatttagccacaattactattgaaaatcatgcaaaaagtgcgtaatatacagaattggtgtcaaaaagaggacatcaggattgtgtataaaaagaggaatgaggattagaaatgcaagagggaaagaaacagagaatcgaatttctggattatctcaaggcagtctgtgtcattatggtaatcattacgcactatggatgggaggataagacatctcctttttttacgatgctgatcaacatggcagtgccggtatttatgattgtgagcggttataattttgcaatgtcaaaccgcaaaaaagcagacggaaatctggagaaaatgtatggctggaatatgatgaaaccaaagctgatccgctttttgctgccgttttttgccatttgtctgcttgagattctgctgctggcagcgcaggataaaaatataccgttgttccgtatttttgtgcttggcgcatacggacctggaagctattatgtaccgatcatgctgcagttgcttgttatttttccgttgatttatgtgatgatcgcatacaatgctaagcttggacttgctgtggcagcgctcgccaatctcgcgtttgaggtgtgcgtcatcgtgtttgatatggataaatattattaccgcctgagcatcggaagatacctgctcttaatcgcgtttggctgttatctgtatctgcatccggagcagagggtaaagccgtatcagatgtggatgatgtttctggcaggactggcatatctgattgcagttttcggattcgacaaggatttcgagttgtttggctactggaagacgacagcgatgccggttgcgttctatattttcccgatcgttattttattgttccggaaattttatcactgtacgattccgggatttgcggggagactgctcacacagattggaaaagcttcctatcatatcttcctgattcagatggtatactatcactttgaactgggcggcgcgatcatgcagacggcatggtatattgctgtcccgtttaacattctggttacggttccgcttggccttggattctatgagctggacaaccagtttgtgaaaaagctgcgcgaggtaaagcattacatccgggcggttgtatagggaacatatttatttgcgcacaggttgtgtcacgtgacacggtctgtgcgttttttatgtaataggattctttttttcaggaaatgccgcgttacatttagcggtgaaagttgggcgcgcaggcagaaaggcattgcacagagagggaaaagagtatagaataaaaatggaattttagcatcgtatcatgggataagtgaacgagagcaggaggaaaaaatgaataagcagagcgaaaagccaaggggacttttgagcgggaaaacagtactcctttgtgtgacgggaggaattgccgcttataagatgccgaatgtagcgcgcatgttgaagaagcttgggtgcaacgtacatgttctgatgacgcagaatgccacgaattttatcacagcgacgacgtttgagacgctgacggcgaacaagtgtctgattgacacgttcgaccggaattttgagttctcggtggagcatgtggcgcttgcgaaacaggcggatctggtgctgattgcaccggctacagcaaacgtgatcggcaagattgcgaacggaattgcagacgacatgctcacaacgacggtgatggcgtgtacctgcaagtgcctgatcgccccggcaatgaaccataatatgtaccacaatccgattgtgcaggacaatatccgcaagctggagcattacggctatgagatgattgaaccggtgcgggggatgctggcgaacggcgatacgggagacggcaaactgccgtccgaggaagagctggccgagtatgtcttaagagaacttgctgcgccaaaggacatggcaggattaaaaattcttgtcactgcaggtccgacacaggaagcgattgacccggtgcgctatattaccaatcactccacagggaagatgggatatgcgattgcgagacgcgccatgtaccgaggggcggatgtgacacttgtgaccggaccgacagcgtgcgagccgccgcggtttgtgaatgttgttccggttgtgacggcggcacagatgtatgacgcggtcatgagccgtgcaaaggagcaggatattattgtcaaggcggcagcggtggcggattacagaccggcatctgtggcggaggagaagatcaagaagtccgatcgggaagcttcgatcgaactggaacgcacacaggatatactggcagctctgggggcggacaaaggaaagacgatactgtgcgggttttccatggagacggagcacatgcttgagaattcaagaaaaaagcttcgcaaaaagaatgtggatctgatcgcagccaataatctgaaggtggaaggcgccggtttcggaaccgatacgaacgtgctgacactgatcacagaggacggcgagcgggaactggcacggatgagtaaagaggaggcagcggacgagctgcttacggaattgttaataataagtaaaggacgcgcgaaggggcagtagacacacggtcatgtgcgcaggcaggggacagagagacgatgacgacagtaaaggtacagaagaaccagataattgccaagcagaaagagaaagtaaaaaaatggtatatcgtgcaggagggtactgtcattcagtgcaattcctacgccaagattgttcttggaaaaaatgcggtgattggaatttctgagggcgacagatatctgtgtgattatgttgcgaccgaggattccgtgctggcggtgttcaattgtgaatcggcggaggatttaaaggaggcgattcacgggcaggagagcatgcgcagtattctgcttcgggcagcactcggacagcggcagatgcttcttagaacctatgccggttttaccaatctggtaaggcagtttcactcctttgccgagaatgagtacagccagtatgagaatctctgcgcacagtaccatctggacgagcagagttttacgcgcatggacaatttcaagccgttggagatggtgcaccgggcggagaactgggagataggcaacagtgccagcctgaccggaagttatttagaggagtatgtgcatctgatgcagcgggacgataatctctgcatcggggcgatcatggaagccagttatcagaccaggcgtgtgacgcagggaatcattgagatggtggaatatctccgctacaatcaggatattcttctggcggaatcgaaaaacgatctttttaacctgttctttgctctggcgattcaggcgcataagaaaaattatgatgtaaagccgcttttaaatgagatggaccggattgccgaggtgatcaaaaagcttggcatctacagcggaaagctggtcgacatgcggatggaagaataccgcggataccacttcgagacagaaggtgcagcgtacgagacgccgcaggcacaggatggcgaggaggaagaaacgcaggaagagcgcagtgaagactgcctggttcatattctgacctatgcggataccgagcagagcgtcatcgaggagatgcaggagcttgtgcagaagtaccgggatctgccggatatgttttccacggacgcgcagacgtttgcaatccgcaagcggatcacacagattttctacgatacctacttaaaagcgtttatgcataccgtaaagggggaaaaagagcttaccccgattgtggaaatgtttttgaatttcggatttatggatgtgcagatggccggcgaggagaatgccaatattctgttcgatctcacggagcatctggatgtctgcaaatctgaccatgtatacacgatttttgaatggctgcgcagtgtttatgacggaagaaacgagccgtcgaaaaatgagttcgatatggattatccggcatatcttgcagagatgcgcaagaccggcaagattacgacagagcagcagaagcattttatgtccaaccgggagctcaaagtcaagtttgagattcagaacatgttcacgtccggaaaccgtgcgacctatggcaagctgtccacgttctgcccgattttaggggagtatgatctgatcaactccattgaaaagatgctcgtgacggcgcagaagctggacgagtcactgcacaagatccgcgacatcgatttctccgcgttctatcgtgaagtgcagttctcggatccggacaagggcatcaaccgcgagatgattatgaaggagatcatgccggacatcattctgatgccgaatgcaggaacacgctcgatgatgtggcaggagacagcaggcgtgcgaagagatacctcggcgcgtttcctgttcccgattttcacagcggtcgatattgacgatatgatggtcgatacggtcggaagataccgctgggagatctgcaggaagattcagggtgtacactggaacgatatccgtgagaagtccctgacggcggagtattgcgattatctgcagttctaccggaagaaccgcgagctttccaccgaggcgaaggagaagatcaagagtgcgctcttgcgtggaagaaataattaccgtgaggtcttcgtcaaggattatcagaactggatgaagtatgagtcgaagggaagctaccgcctcaacaagatcgcaagagagatcctgattacctattgcccgttcgcaaagccgatccgggaggagttaaaggggaatccgatgtatgagagcgctctgcaccgcctcgatcttttgaacgcgaagaccgtgcagcgtatccagggagtctatgacaagtatcagaaagccggcggcaggatcacgcaggagcttaccgacaatcttgaatattatgaactgtgataagatatcaactgtgataagatagaaaaagccaggtgcgatgcacttggctttttctgaggggagtataaataattaataaggggtataaaatgatatgttttacatatcacagcattagtatagaacattctttttgaaaaagcaatgcaaaaccacaaaagccatgtatattttccggggaacatcagatactaaccatgcagtaagcaaataaaaagattcggcacgagcacgtgccgggatggagggcaacatggcaaaaaacgaaagtacacagaattcgacttctaattgcagagacggttatgagaacagctacgagaacaacgcgggaagcggttccaacagcgcaaagaataagtcgaccaacaagtcaaccaacaagacatccaacgtgtccggttccaacaagacctctgacaagtatcagcagtagactggcacaggcagagaaaaagcgcataggatagaataagattgacagaaacagattgcagagaacctctttgtaatctgtttttgcgattacaggagcatatggcggaaaaggaggatacgcgggcatgacgttttatacgatacatccaagggaattggaagatattatgagaagaaagcacggaattctgattgatgtgcgggaggcggattcttatcgggaataccattatccgaacgccagaaatcttccgtatgaaaagatcgatcagtggatgcaccgtctgccgaagaacagaccgctggtgctctactgcgattatggaagcaccagtcttctggcggcgagaaagctcggcagggaggggtatgaggtatataccgtggttggcggcattgaggcaatgcgaacaagtgattgacagggaaaattagaatggataatatattattaggaaattagacatatgatacagaggagaatacatgaagacatatgaactggtggttccatgtcattttggactggaagcggtacttaagagagaaatctatgacctgggatatgagatcagccgggtggaggatggcagagtctcatttcagggggatgcggaagctgtctgccgtgccaatatctttctgcgcacggcagaacgcgtgctgatcgaagtgggcagattccgcgcaacgacctttgaggaattatttcagggaatcaaggcgcttccgtgggaggactatatccctgtgaacggaaagttctgggtaaaaaaggcgtcttctatcaagagcaagctgttttcttcgtctgatattcagtcgatcgcgaagaaggcgatggtggagcgcatgaagcagtactatgatgtggaatggttcgcggaggacggggcgccgtatccggtgcgcatctttctactgaaggatgaggttatggtgacgctggatacgtccggggactctctgcacaagcgcggataccgcacattgacgagcaaggcgcctctgaccgagacgctggcagcttccctgctgctgttgacgccgtggagaccggaccggattctggtggatccgttctgcggcagcggtacgttcccgatagaggcggcgatgattgctgccggtattgcgcccggaatgaaccgtgagttcacggcggagcaatggacgaacctgattgaccgcaagctgtggtacgagtgcgtaaaggaagccgaggagatgatccacacggatgtgaaggtcgacatacagggctatgatattgacggggacgtcataaaggcagccagggagaatgcaaaacgcgccggcgtggatcacctgattcattttcagcagcgcccggtggcagaactccaccacccgaagaaatacggctttatcgtgacgaatccgccgtatggcgagcgcctcgaggacaaggcggatctgccgaagctgtacggggagatcggggcggcattccggggacttgattcctggtcgatgtacctgattacgagttatgatgaggcggagcgttacatcggcagaaaagcggacaagaaccgcaagatctacaatggaatgcttcgcacctatttttaccagtttatggggccgaagccaccaaggcggagtgtaagggataccgccggaggggatgaatgaaatattcaaaaagatatatcgtgtttggcgtgctggtagccgccatgctgatttttaaattagaactgggggcatcggggagcggaacggtggaaaatttccgcggagccaatctgcaggcgacaacctggaacccgttgatcgcatccagcgtaaatgataatctgttgtcgctggtgatcgataacaaggaatacaccaacgagaaccatacgttttatatggatgaccagctgaatatcatggttccggtgaacattctgcgcgatgcactcaactgcagcgcgcatgtgtatgacggaaagcggctccttgtggagaagcatgcgaatgaggtggagttttcactgggcgcctcggaggcgaaagtcaacggaacccgtgaggtgatcgtgtcgccgtttatccgcaaggacgatacctactatgtaagcctgaatgatctggcgaattatctggattattcctattcctgggatatacaggagaatcaggcgtcggcgatggacacgtcggacagtgcgacaatcataccgacccgctatgatctgagggagaagggacgggcggcagcagtgcgcaatcagggaactttcggcacctgctgggcgtttgccgcgctgggggcactggagtcgtcgttgctgccggaagagaaactgcagttttcggtcgaccatatgacgatgaacaatggatttacactgacgcaggatgacggcggggaatataccatgggaatggcttatctggcggcatgggaaggacctgtatacgaagcggatgacccttacggggacaataaaacgaatccggatcttacagcggtcaagcatgtgcaggaaatgcagatcatcgacggaaaagattatgagaagatcaaggagtcggtctttttatacggcggagtgcagacgtcgatctataacgggctgcgcagctcgcagtcaaagtctccgtattacaatcagaagacaaattcctactgctatatcggtacggagaagccgaatcacgacgttgtgattatcggctgggacgacagttattccaaggagaattttaatgtggatctcgagggagacggcgcatttatctgccagaacagctggggagatacgttcggcgaggacggggtgttttacatatcgtattatgatacgaatataggcacccacaacgttgtgtatacaaagatcgaagagccgggcaactatgaccatatctatcagagcgatctgtgcggctgggtcggacagcttggctataacaaggacagcgcctacggcgccaatgtctacacgacgtcacaggaagaagaactggtggcggcaggcttttacgcaacaggaaaagattcccagtacgagctgtatgttgtacggaattttgaaaatgcagattcgctgacacagcggattccggtggcgtccggcaagctctccaacgcgggctattatacggttgattttaatcaggcaatttcactggatgcgggggagcgttatgcgattgtgcttcacatgattacgccggggtcggtgcatccgatggcaatcgaatacgctgccgacgaggcgaccgcgaatgtgattctggacgatggtgagagttatatcagtaccaatggtgccagatgggacagcgtggatacggtggaggaatgtaatctctgtattaaggcattcagtaagaatcgataaaggaatatacggttatggaagaaaaagcattgagactgtcggctgtctttctcatgattttgacagcggtatcttttgtgcttctgccgaagcttccggcgcttcacacgtgggaggtggaggcgagagaggaacgcattgccgaggaggagttcgcccagagtcaggtcacgatgcagaacttaaagatcaaagagcagaatgaagcggcgggggcgaagggagaactgagtatccgcctgccggagggcgtgaccggggatcagattgctgtcagcaacgattatgtgacccagactatccgggtggaaatcccgcaggcggaccgcacttattttgacagctacccggttctggggaacagcgactatattgacggtctctcctacaccaggcagggggagacgggcgtgatagaggtcacgaccaacaaggtatatgaactgcagacggaatatgatgcgcagaatttttattttaattttttgacacctcatgaagtctatgataaagtagtcgtaatcgatgcggggcacggaggaagagccgtcggtgcgaacaagcagggaatcaatgagaaggacattgacctggcgatcgtgctgaagctgaaagagatttttgacaacagcgatcagaacatcggcgtgtattacaccagaacggatgacagcaatccgacgttcgaccagagagtgcagcttgccaacaagtcggacgcggatctttttatcagtatacataacaactcgacgagaagcggacgcatgtcgggtaccagcggtacacaggtgatgtacgacgagacgtcggaggcgagccgtcagttcgcgcagatctgtctggaggaagtcacaggcaggatcgggagccgtgacaaaggactggtggagggcgacagtatttatatcattagaaccagtgaggtgccggttgcactgattgaagtcggatttatgacgaacaaagatgaactggaaaagctgaattccgatgcatatcagagggagacggcagagggcgtctatcaggcagtgcttcgcgcatttgaagaaggatactaaaaagaggacaaagccatgagaataatttttgccaccggcaatgccggaaaaatgagagaaatccgcgagattatggcggatatggatatggagatctgttccatgaaggaagcaggtatttccctggatattgaggagaacggcacgacgttcgaggagaatgcgcagatcaaggcgaaggcagtagctgcctgtacgaaggatattgtgctggccgatgattccggtctggaggtggattatttaaacaaggagccgggcgtatattcggcgcggtatctgggcgaggatacttcctacgatattaagaatcaggcgattctcgaccgtttgaagggcgtgccgaaggagcagcgcacggcgcggtttgtctgtgcgattgcagcagtgcttccggacgggaagacacttgtgacacgggagacgatcgagggatatatcggggaatgtccggcaggggagaacggatttggatatgatccgatcttctatgtggatgagtatcactgctcgacggcggagctgacagaagagcagaagaatgagatcagccacagaggaaaagcgcttcgttccatgaagaagttgttgcacgagtacgggttttagcctatgaaaatactggttgtaagtgatacgcacaggaaacttgaaaatttaaaagttatcttagagcgtgagcagccgatggatcttctgatccatctgggtgacgcggagggagatgaggacagtattgcggagatggcgggctgccggctggagatcgttgcgggcaacaatgactttttttccaatcttccacgggaaaaagaacttcgcatcggcagctaccgtgtattgatcacgcatggacattattactatgtcagtgcggggatcgccgatattgagcgggaagcggcggcacagggctatgatattgtgatgttcggacacacgcacaggcctgtgatcgattacacaagggatgtgattgcgctcaatccgggcagtctttcctatccgaggcaggaggggagaagaccgtcctacattgtgatggatctggacaaaaacggaaaggcaaattttgaaataaaatatttataaaaaagtgttgacttttcagaggctgtcctatataataatccttgcgtcacgaaaaggacagctcagtggccggaagagtgcgcaagcgataaaatccttcggggtgtggctcagcttggctagagcgcctggtttgggaccaggaggtcgcaggttcgaatcctgtcaccccgatttcgtgcgggtgtagttcaatggtagaacaccagccttccaagctggatacgtgggttcgattcccatcacccgctttaaatctgcactgacaggtttatacaagatcatatgtgttcgtagctcagctggatagagcaacggccttctaagccgtgggtcgggggttcgaatcccttcgagcacattttatggtgggtatagcgcagttggttagcgcgccagattgtggctctggaggcccagggttcgaatccctgtatccaccttagttgcgataggtgcaacgattatttgttgggctatcgccaagcggtaaggcactggattttgattccagcattcgcaggttcgaatcctgctagcccagcttgcttttgttgtaatctgatataggagatactagctcagttggtagagcacctgacttttaatcaggttgtcgggggttcgaatcccccgtgtctcactaaggaatggagagcggaaagccggtaaaggttttccgctttttgtgactttggaacaaaacttagtgagaattgcctattgtattaccgctaaggtatgttatactgttaccgttgcaagtaaatattgttcgcagagtagacacatgcgcgttaagtgccggctgaacagggagttgtcagccagacgaaaagagtttcttgcggtgcatgagtcgcatcccgctgcatccgaagataggaatattatctccagttgtagtatgatgaggtctgcaaaggaggtaatttttttatgaaaaaattcgtcgctttgttcaccgattcctaccgtgaattaaaatcggtaagaaccatcactaccatggctatgctggcagccatcgccattattcttggcatgttctccatcgaatacggcaattttatccgcatcggtttttcgagtatcccgaacggaatcattgcctacctgtttggaccgacggttggcggcattttttccggaacgcttgatattattaaatacatcttaaagccgaccggtccgttctgtccgcagctgacactggttacgatgctggcaggcgttatgtacggctgtatgtattataagaagaaactcacactgccgagggtgcttgccaccaagtttatcgtgatgctggtgtgcaatgtgttcctgaatacattgtgcctcaccgtgttatatggacaggcattcatggtgatccttccggcgcgtgcattaaagaatctgattatgtggccgattgattccgtcatcttctttgcaacagcgaaggcgcttgagagcattggcgcattccggtttgtgcgaagggcgcaggcggagcggatcgccagatcataaagagataagaaataagaaataagaaataagaaatgctgccggaatacggcaggcatatagagcgaaaatccccacgatgtcatattccggcatcacggggatttttgttgtttcatgggaatagtgcgaaagtacgaaaaaaggcatgtaaattttcgtacagtatggtataatgtaggcgaaggcagaagtgaatatggtgccaggacggacgcccgcgttttcatgcggcggacgaaagtgttcagaatataaggaaggtaagcagggagcatcaccggaaaaggaggagacctatgaagagtcgaagaattccgttagagtccgaagtagacaaatacgaagtgggaaaagggatggaagatggttttgaactgttttccgatgttgtgaccaagggatggatcgtgacggattcgctcgtaaagattgagcggcccgacggtacgatcgtgtgcccgtacatcaagcaccgcagaggacgtacctttatcggtgagggcgattatattatcgttcagcaggacggcacgaagaatgtatgcggcgcggacaaagtgtggacacgctatgagaagccggaggcttaaatccaaaaagaagttgcaatctgtctgccagcacgctataatataccggtagctttccaagggaagcagttatttctctgataagcgggtatggcggaattggcagacgcgccagatttaggttctggtgggagaccgtgcaggttcaagtcctgttacccgcagtagagcaggagaaaagtggaagacaggacttgaaccttttcaagctcctgttacccgcagtagagcaggagacagagcgcagaatacggcgtgaagttttcgggttttacgggcgtttccgtgaataggaatagaataagaaaagccatgtacgaagatgtatacttcgtatgtggctttttttgacgctgtgttacggtgcagtgataatgaatcagcgagatgctcatataaagaaagagactgattcaacggccgggccattcggtgcggcgcgcactccactgttcgttcagccagccgaccacctgctctttgccctccggcgtaaacggaaagacagcagaacttttcagatcgtccgcggtgctggcaaaattataaggaccgggccagatggtgacgcgaaaaatatcatgttttacattttcgtcctcggcatcctcctcctgatctttttggatgaggtaacgcattccctgataactgccggtaaatttttcctttttataaaagttcatattcagaatatcatcattttgaatcatgatggatctgccttctttctgtaagagataatgtgattgaagaaagtataacaaatttctaaaaaaaaagacagagtatttatgtgggaaaaacacttgtatttactgggcgtacagaaaaaggaggtaatatccatgtatttttgtatacaattagcagttgacaaatgatagtgagcgagtataatacacttatattattttatcggattaaagtgacattgcattagagatacaaacagataaaagaacgcaatgatagagcgataaaatgagaaagaattttcaagaagcaggagagaaaaaaagtgggaaagtatatcgtaaaacgagttttactggcgattatatccatcctgatcgtcagtgccattacattctttgtgatgaacattatcccgggcggtcctttcaataaggaaaaggcaacgagtgcggaggcacagaaagtcctggaagagagatataatctggacaaaccaatcccggagcagtatgtgatttatatgaataatcttcttcatggtgactggggcgtatctttacatagcggccgtgatatctggggcgagatttcttcccgttttaaggtatcggcaaagcttggcggcatggcggcattggtggcaatcgtggctgggcttgtacttggaagcattgcggcgctgacgcgtaatcactggccggaccggctgatcgtattttttacaacacttggtacggcgatgccgtccttcgtgcttgcaacactgcttcttctggtgttctgcttaaagctcggctggttcccggtatggtcgtccacgagtccgaattatgtactgccgatcatcgcgctgagtgtttatccgatggcgtatatcacacgtctgacaaagaccagtatgctggattccctgaaccaggattacatccgtaccgcgagagcgaagggtgttccgggctggaaagtcattttcaaacatgcactgcgcaatgcgctgattccggtaatcacttacgtgggaccgatggttgcatacattttgacaggttccatggttgttgagaatatttttactatcggaggactgggatcgtctttcgtaacaagtattaccaaccgtgactatacgatgattatggcaacgacaattttcctcgcaattctgatggttgtggcaaacctgctgaccgatattgcatataagttcgtcgatccaagaatcacatttgagtaaagtacgaaaggacggatagaagtaatggagttgaaacatagacagattctgtcggcacaggtagatctgagcaaattcaataaggcaaatttcgagaaggcgacagatgaggaaaagaagcagcaggatgtcatgggtgagtctaccacatttttcaaggatggtatgagacgcctgcgcaagaatccgcttgccatgggaagtatcatcgtactggtattgattcttctgaccatcatcatcgcaccgcatatatgtccttacaagtattccgagattatctcggtcaacggtgtgcgtgacaaatccgcagcgaacctaggaccgtttgaatattccaagcttgaggcaaagtatatgaatgagaccggcgagaagctgttcccacacatcttcggaacagacagcttaagccgtgactactttatccgtgtaatctacggaacgagagtcagcctgtcggtcggcgttgtggcatcgatcatggtattgatcatcggtctgctttacggttccatcgcaggatattttggtggaaaagtcgacctcatcatgatgcgtattgtggatattatttattccctgccggacatgctgatcatcattctgctgtcggtagtgtttaatgagacgttaaaaccgctcattaccggaacggtgctggaaaagctgggaacgaacatgatctccatgtttatcgtattcggacttctgtactgggtaagtatggcgcgtctgatccgaggccagatcctttccattaagaataacgagtacgttctggcagcaagatgcatcggtacaaagaatgccagaatcctgcgcagacatattctgccgaactgtctgtccgttatcattattacgacagcacttcaggtgccgagtgcaatttttaccgaaagttatctgagtttccttggccttggtgtatctgcaccgcttacttccctgggaagtctggcaaacgacgccagagccggcatgcagtcctacccacttagattggtcattcctgcaatcgccatctgcctgatcgtactggcattgaacttactgggtgatggtcttcgtgatgctttcgactcgaaattgaattaaggagataaggatatgagcgaagaaaataaatatatattagaagtaaaagaccttcataccagtttctttacagatgcaggtgaggtaaaggctgtcaatggtatttcctttaacttagagccgggaaagaccctcggaatcgtaggtgagtccggttccggtaaatctgttaccgcatattccatcatgcagattctggcggagactggtaagatcaccggcggcgaggtaagatttcacggtgaggatattaccaaatggaacagcaagcagatgcagaagttccgtggagaaaaatgctccatcattttccaggatccgatgaccagcttaaacccggtatttaccgttggaagccagctgattgaggcaatattattacacacggataagaataaaaaagaggcgtgggcgcgcgcggtggagatgctgacactggtcggcgtcaatgagccggaaagccgtatgaagcagtatccgcatgagctgtccggtggtatgcgtcagcgtgtcatgatcgccatggcacttgtctgtgaaccggatatcctgattgcagatgagccgacaacggcacttgatgtgacaattcaggcacagattctggaactgatgcaggacctgcagaaaaagcttggaatggcgattatcatggtaacccatgatctcggtgtcattgcaagtatgtgtgatgagattcttgtcatgtacggtggacgtgtctgcgagcgcggtacagcggatgatattttctatcgtccggcacatgagtataccaagggactgcttcgttccatcccaaaggcagacaatatgaacgaaaagctggtgccgatcggcggtacaccgatcaacctgctgcagatgccggctggctgtgcattctgcccacggtgtgatgcggcgatgaagatctgtctttccgagaaaccggaagaacttcgcatcagcgatacccatctggcaagctgttggatgaacatcaaagagttatatgaggcacaggaggaggcagagtaatgagtgaggaaaagaaccttcttgaggtaagtcatttaaaacagtattttcctgtgcatcagggatttaagacgattccgctaaaagcggtggatgatatttcatttgcaatcaagccgggcgagacacttggtctggtaggagagtcgggatgcggcaagacgactgtcggcagaacgctgcttcgtctgtaccagccgaccgccggacgcatcgtgttcgatggtaaggtgctatttgacagcggcgagcagtatgatgagaatggcaagctgatcgtcgatgcaaacggcaagccggtgcttggcaagaaagtggatgtggacatgcttccttaccgcagacagatgcagatggtattccaggatccgtattcatccttgaacccgcgtatgacggtcgaggacatcatcggagagcctctggatgttcataaattatatgcgaataaaaaagagcgccgtgagaaaatcttaaacctcatggaactggttggactgaatgccgagcatgccatgcgttatgcacatgagttttcaggcggacagagacagcgtatcggtattgcaagagcactcgcggtaaacccgaagtttatcgtctgtgacgagccggtttctgcattggatgtgtccattcaggcgcaggtggtaaatatgttcgaggaactgcaggacaagctgggcgtggcgtatctgtttatcgctcatgatctgctggtcgttcaccatatttccgaccgtattgcagttatgtatcttggaaaaatgatggagattgccgatgccgatgagttaaacggcaatccgatgcatccgtatacattgagcttactgtcagcggttccgattccggatccggagacagccagacacagcaagcgtatcgtgttggagggagatgtaccgagccctctgaagatgccgaccggatgtccgttccgcaccagatgcaaatacgcaacagagcagtgcgcaaaagagatgccgccgctttccgacaggggcagcggacacttcgttgcatgctggaataagtaaggtttcaacgttaccgaaaaggtacgtggaacatagatcattttataggaggaaaatcctctgctcctgttgtgacagtcgcattttccttcggaaaacaaggaggattcattatgaagaaattagtagcatcattactggttgcttctatggcacttggtcttacggcttgtggcggatcatctgattccacagcaagtacaggcgagtccacaggaaccgctgctgctggcacagaggctgcagcaactgcagaagcaacaaccacaaacgctgagacaaatgtgctcaacatcaacctggcaagtgagccggattaccttgatcctgcattaaacagctccgtagacggcggctgccttgcagtaaactctttcgcaggtctttatacctatgataaggatggtaatcttatcccggcactcgcaaccgatatgccggaagtatctgaggacggaactgagtacaccgttcacatgattgagtccaagtggagcaacggagatgacttaaaggcatctgacttcgtatacagctggaatcgtgtcatcgatgagaagacagcagcagactatgcttacctgttcgacgtaatcgaccgcaacgatgacggtacactggcagttgagacaccggatgattacacactcgtgatcaagcttgtcagcccgtgcccgtactttaacgacttactggcattcccgacattctatccggtacatcaggcatccgtagaggctgctgatacggacggcactgttcctggcaagtgggcacaggaagctggttttgtatgcaacggtgcttacacactggagtcctggaaccacaacgagagcatggtttatgtaaagaacccgaacttctatgatgcggcaaacgtaaccatggacgagcttcacttcatgttaagcgctgatgatacagcaatctatgctgcatacaacagcggtgaccttgactacatcgataccgtgccgaacgatgagatcccttccttaaacggcgtcaatccggagtttggtatccttgacaacctgggaacctattacatcggcttcaacgtaaacgacccggtcttcgatggcaagacagaggaagaggctgctaagatgcgtgaggcaatcagcttactggttgaccgtcagttcatcgttgagaacgtaggccagacaggtcagatcccggctgattctttcgtaccggaaggtatggcagacggtaacggcggcgtattcaagacagcagatacttcttactatgatgcaacagctaccggcgctggcgagcttgagacagcaaagggcttactggaagaggctggatacacatttacagacaacggtgacggtacatacgcagtagatcctgcaatctccatgacatacttaacaaacgacggtacagcacacattgcggttgctgagtccgtacagcaggatgtggcattacttggtatcaaccttgagatcaagtctgaggactggaatgtattccttgaggatcgtaagagcggtaacttcaccatcgcgcgtgagggatggcttgcagattacaacgacccggttaacatgttagagatctttacctctgattccggtaacaacgatatgcagttaggaaagggtactccggtatcttcttctccggactggacagcatatgatgagctgatcagtcagatccgcaccacaacagattttgcagcgcgtgttgacttaatgcatcaggcagaggatatgctgatggatacatgggcagtagttccgatctactactacaatgatatttacatgcagaagtctaacgtaaccggtatctacgcaacgatattcggtatgaagtacttcatgtacgcaacaaagacagcataacatcataagaactgactggtatgtatgactgcaggtgatgcatacttatacaggaaagagaaatcccggaacggagagaaatatccgttccgggattttttgcgtggaaaaacaggagaagaaaaaactgcatatttagtcatataaaaatcgaggcgaaaaaatgaaaaatggtagaaaatggcagagattaggggaaaacctgggaaaaacaaacaaaacatagtgtaaaaatatgcagagaaataaatgagattgtaaaaacatgcgaaacgaggcagaatgtgccagcgggaaaagtattgacaaaaccagtttcctatgtataataaaaaaagtgttgtgcgtgtgcaacatacaagtgtattttgcaaagtgttcagtggacaaagaggttcattgtcacttttttttgttacacaaaaatattttagcacaataacgcggtaatattgcactatactgtatgacggacagagagcgatgaggcggaagcggcgatgatcaagaacccttatcaaaaggattatcaaaatgaattaaagcagaaccggcatggtcttctggtgacaagaacgtcctatcagggagatttttatgtgcttccgtttgatgagcagcagaagcggcggacaggcattttaaatgtcatctggacaatcgcgctgtgggtgattgagcttggaatggggcttataaacccggattcgtcccgcacggcatggattgtttttccgtatctgtttgtgatacttccgcttggatacatgctttatggtgcggtcagctatatcggagcaccgctccggatgcaccgggcacattatgagacggggctgcttcgcatgaagcgttcctgcatcggggcaatggtgctgacgggaatcggagcggttctggatcttgtatacatggtgctgcaccgtggcgagatccggatgggaatggaatgtatctatctgatatgtcattttctgtttctggcggttgcatttttcttcggaaagtattatgaccgcaattacagtggcgttctgattgagaatgctacaatggagtaggttttttccttttataaggttaaaacatagataatatttttataaggaggaaatattatgaaaaaaatgagacagactcttgctttgttactggcaggagcactgactgtcggttcatttgcaggctgcggcggaagcaaggctggcggcgagacagctggaaccgagacagcaggcacagaggcagcaggcacggctgcatccggcagcgacacaccgctcgttatcgcaaatgacggtatgagcgagaagttcagcccattcttcgctgagagtgtgccggatcagaacatcgttgatgtgacacagatttctctggtttacaacgatcgttccggtgagtttatctacaatggtatcgagggtgagaccacttcgtacaacggtaccgattatacttactacggaccgaccgatctgaccatcacagagaacgaagacggaaccgtatactatgatttcaagcttcgtgatgatctgaccttctccgatggagagccggtaaccgcagatgatatcatcttctctttctatgtattctgtgatccgacttatgacggaggcgcatctgtatactctctcccgatcgagggtatggaagagtacagaagcggtatgtccacactggcatctttacttgcggcagcgggcgaggataacacagacttcacatactggacagaagatcagcagaacgcattctgggatgctgtaaacgatggtggtgcagcatttgcacaggaaatcgttgattactgcgtagagaacggcgtcagcgaagagggcgacgtagcaggcgcagcagcacagtggggcttcgacggtcttgcggcagatgcgaccgctaaggatttctttatggcaatcggtgacaagtacggatggagcttcaccgctatggaggctgagtctgcaggaagcgctctctccgatctgattccggaagacgtatatgcatacgctaccgaaggtgttgagaccggtgatgcagcagcaaatatttccggtatccagaagctggatgacaagaccgtacgtgttgttctgacagaggtcagcgcaccggcacttcagaccatggatatccagatcacaccgcttcattattatggtgatgagagccagtacgattacgataacaaccagttcggtttcacaaagggtgatctttccgcaatccgcgagaagacgaccgctccgcttggcgctggtccgtatgtcttcaagagctacgagaacaagacagtatatctcgaggcgaatgagtcatactacaagggagcaccggctaccaaggaactccagttcaaggagaccgctgaggcagataagcttccgggtgttgttcagggtacggtagatatttctgatccgtccatctccaaagaggttatggcacagatctgctctgagaacagcaacggtgaggtgtccggtgatgtattaaccaccgctctgtatgacaacaatggttatggttacatcggaatcaactctcagaatgtcaaggttggcgatgatccttcttctgagcagtccaaagatttaagaaaagcaatcgcaacagtaatttctgtatatcgtgatatggttatcgactcctattatggagaggcagcagcagtaattaactacccgatctccaatacttcctgggcagcaccgcagaagtctgacgcagactacgaggttgcattctccaaggacgtagacggcaacccgatctacacagacggtatgtcggatgacgagaagtatgctgcagcacttgacgcagcacttggattcttcgaggcagcaggttacacagtaacagatggcaagctgacagcagctccggctggtgcgaagttaagctatgaggtaatgatcggcggaggcggaaagggagatcatccttccttcggtattctgaccgcagcatccgaggcacttaagaccatcggctttgatctgacaatcaacgatctggctgacggaaccatcatgtgggatgcgttaaacagtgagactgcagagatgtggtgtgcagcatggcaggcaaccttagatccggatatgttccagatctatcacagcgaaggcggtagcgcaaactactatgcaatctactctgacgagctggatgaactggtaatggagggaagaaccaataccgaccaggcattccgtaaggcagtttataaggaagcacttgactttatcgtagattacgctgtagagattccggtatatcagagacagaacgcttctgtattcagtacacagcgtgtcaatgtggattccattccgcaggatctgacaaccttctatagctatctcaacgagattgagaagatccagatgaactaaggatcagagtaactggctgatggtggagggagaggggagcaggctcccctcttctacaacctgtgccatggtgcatagggatttaaaggtattttgcaagaggatgcgtgacgcctttttgcaaaatacctttagcatcagaagcagcgaggaaaggaaaaagaatcatgaagaaatttgttgttaagagagtattgctctcgattgtcatactgttcttcgtctccatgatcatctacgcgatcatgcgttgcatgccgtcgtcattcgtggagcagcaggcactgacattgtcacagagaccgggagcaaagagttatgacgaatgggtggcacagttaaatgcatcgtacggtctggacaccggtgtgatccagggatatttccgctgggcagcaaaagcaatccgcggacagttcggtgattcctggtattttaaccagccggtactgaccaaattcgcaagcgttatctggtattcgtttgcactgtcactggcatcttttgttctggagatcatcatcgcaattccggcaggtattgccgctgcgagaaagcagtattctgcaaccgattatacaatcaccgttattgcactggtcggtatttctcttccgagctttttcgttgcaacacttttaaaatgggtcttttccgtaaagcttggctggttcgacctctacggtattgtcggacgtaacttccagagcctttcctccggacggcagattctggatatggcatggcatctggtacttccggtaattacactgacgatcgtgagcatcggttccctgatgcgttacaccagaaccaatatgcttgaagtgctgaatgcggattacatccgtacggcgcgcgcgaagggactgccggagaagcgtgtcattcattaccacgcattccgcaatatcttaatcccgattatcacgctgctcggcggtacactgccgggactcttcagtggtgccatggtaacagagacgctgttccagatcccaggtatcggatatacttcttaccaggcggtattacagggtgacattccgtttgttatgttctacatgctgttttccgcagtgttgatcttacttggcaacctgattgccgatattttatacgcagttgtggacccgcgtgtccgcgtgaactagaaaggaggagagaacatggagaacgagaagaataatatgaagcttgatgacgcgcagcgtgtccgcgtactttcccccggaatgatggttgcaaagcggtttttccgcaacagactggcaatcgtaggactggttatcattgtctgtatgttcctgtttgcctttgtcggaggtgcggtcaatccgtattcccagagtgaggtgttctaccgcacggaagagatgaagaaggactacgccggtgcggcaaaaattgacgagttccaggtgttcgtggcggacggcgtggagcttccgagcgatgtgtattccaagatgatccttgccgtgacgaaaaatgcgctggtgttcgagaccagagacggacagacactggcacttggcaggattgatgacgacacataccacatttacgcggcagagcagcagatgaatccattggcattaaagtctgaggagcacgacgctgcggaggctgccggacagaaccagtttacttacaacggcgtggagtatgtgtttgatgcatccggtgtgaaagagacactgtacacgacgacagagcttggtattgcctgccggaagtctgtgacagcttttgatgaaggcacaacattttcttatgatttttacagcaaggtgctgactgcgattgcaaacggcgataagaacatcgaggcggacggcgtgaactacacggttgaaaacgagggaagcgctgccatgattcatacggcagacggtgcggattatgcttatgtatctgatatgagcatgaatccggtagccagcggtatcgtgctgacaccggcgttcaaggaggcggctgaggctgcaatgactgccggggaggattcctttgagtatacagacgagcagggtgagaccgatacctacctgatcaaggataagaacggtcagtacacgatccagcgctatcaggagacgcgtgtcatcgacagttatgcggcaccgtctgtaaagcactggtgtggaacggacggcaacggaatggatcttctggcgcgtctgatgtacggcggacgaatttcccttatgatcggatttgtcgtagttatcattgagcttatcattggtatcattgtaggtggtatcgcaggatttttcggcggatgggtggacacactcctgatgcgtgtggttgatgttgtttactgtatcccggcgattccgctgtatctgatccttggttcgatcatggattactacaaggcttcggcaaagacacgtatctacatgctgtgtattgtcatgagtatcatcggctgggtcagcattgcccgtattatccgcggacagatcttgtccctgcgagagcaggagttcatgacggcggcagaggcaaccggtatccgcgtaagccgtaggattttcagacatctgatcccgaatgttatcccgcagcttgtcgtattcgcaagtatgggaatcggtgatgtcattcttgccgagtccacattgagtttcctgggtcttggtatcaagtatccggcggcttcctggggaagtatcatcaatgcggtcaacgactcttacgttatgacgaactatttattcgtgtgggttccggcaggcgtcctgatcctgctcacggtacttgcatataactttatcggtgatggtctgcgtgatgcattcgatccgaagatgaaacggtaggtgacaggaatggcatttaataataagaagaaaaacgcaaattatatctccgcaaaagaatcccgcgcgattgcgcgggagaaccgcaagattacgcaggagatcgagaaaaaaagaaacagaaagcatattccggaggaggaatatgtgacaaagatgaagaatccggagaactgcgttgagttcgacaacgttcagacttatttcttcacggacatcggaacggtcaagtctgtcgacggtgtatcgtttgatgtgccgcagggcaagacggtcggtatcgtaggtgagtccggttgtggaaaatccgtgacaagcctttccctgatgcagctggtacagcgcccatccggtcagaccgtgggaggagagatccgctttaataccggcgatcatgtatacaatgtggtcaacaccccgacttctgtgatgcagaagctgcgcggcaactacatgtccatgattttccaggagccgatgacttccctgaatccggtacttcgtatcggcgagcaggtggatgaggtcattgcacttcacaatcctgacatgacaaaggatgacgtcaagacacgtacgatccagatgcttgagatggtcggcattgccaataaggaaggtgtataccggatgtatccgcacgagctttccggcggtatgcgccagcgaatcatgatcgcaatggcgctcgcatgtaatccgcgtctgattatcgccgatgagcctacaacagcgctcgatgtgacgattcaggcacagatcctcgatctgctccgcggactcaaggataagatcaacagttccatcatgctgatcacacacgatctcggtgtggttgcagagatggcagattacgtggtcgttatgtacgcgggacgtgtcgtggaaaaaggaacggcacgcgagattttcaaagatccgagacacccgtacaccatcggactgatgaagtctaagccggtggtcggaaaatatacggagaagctttacagcattccaggaagcgttccgaatccgattgatatgccggactactgctattttaaggatcgctgtgagatgtgcgtagacggctgtgagggagcatatccgggaatgtaccagatctccccgactcattttgtaagctgctaccgctgtgcggcggaggcagtcggcaaggaaggagacacgaagaatgagcaataacgaatcgacaaagacaatcaatcagagcgacaatattcttgaagtgtctcatctgaaaaaatatttcccgattaagggagggttcttcggcggtgcgacaggcagtgtgaaggcagtcgacgatgtgtctttcaacattaagcgcggcactaccatgggacttgtcggagagtccggatgtggaaagtccacgactggaagaacgatcttacgtctgatcgagaagacagacggcgagattctcttcaatggcgaggacatcagcaagtacgataagaagcagctccgcgatctgcgtacaaagatgcagatcattttccaggatccgtattcatccctgtctccgcgtctcccgatcggggagatcatcggtgaggcggtgcgcgagcacggacttgtgccgaaggagcagtttgatgattatgtcaccaaggtaatgaaggactgcggattacaggagtatcacaaggatcgttatccgcatgagttctccggcggacagagacagagaatctgtatcgcacgtgcacttgcgctgaatccggaattcatcgtgtgtgatgagccggtatctgcactggacgtgtcgattcaggcacagatcatcaacctgcttcgcgatctgcagaaggagagaggactgacctatctgtttatctctcacgatctgtctgtcgtagagcatatttccgataccgtgggtgttatgtaccttggcggtatggtggagtccggcgagactgccgatattttcggcaaccctctgcatccgtacacgaaagcgctgttttccgcgattccgatgccggatccggatgtcagaaaggaacgtatcctcttgaagggcgatattccttccccggctaatccgcctgcaggatgtaagttccacacccgctgcagcgagtgcatggagatctgtaaacacgaagagccgcaggtcaaggatgtcggcaacggacataaggtaaaatgtcatctctatgatgaaaaatagacgggaggctgccgcttcaggcggacagctggcgtcgaaagagatgtactaggataaaagatcacatttttcgatttcgctggaagtgtagatggaacattcgttgaaaaaaatgcgtgcatttcttccggctgaatgtttgcatcagattccgtgtctcttccacgtttggacaatccgacgggtgcatgtccgacacaccggagacaatgggcggactttctggtgtccctaatggcacctcttcacagacaatataaaaccgcgcgaaccgaaactctttgccatctgctattaaaaacatggcagatggcaattcaaacatcggcttcgcgcggttatgttttgttcagatgtgccataagggacacacacaaaagtcctacaaattgtcttccgggatgcggacatgacccgcggagtgctccaaacttggaaagacacggatcatcgaagatgcagacattcggctggctagaaatgccgctttttttgatccggatttccagctacattccatcgaaatcgagtggtgtgatctttttatcctatttacttatctatccggggaggctgccgcttcaagcggcagcctcttcgtttgaaattggcttgaagatgacggatgggttttatataataaagggtagaaatgtcagatcgggagaaggagcgagggaaatgttgtttgacagagctgcgaaaggaaagaagtcaaaagagctaaaaggggagttgaaggatttaaaaaagagtcttctgaatgcggggggcgagaaggcgtatgtgaatgaggcgctgagggattatcaggcggcgctggaacagggggatactctgcgggaacagtatgaggaggcgagaaggcacctcgcgcagtcgagggcggcgattgagcgtctgttggagtgcatgaaggaaagtccggtaagtgaagtcaaaaagagcctggacgagctgatgggagatctggaccaggtctatcatgattgttccatccgggatgacgatctcgattttcagtccacgattcagagcttaaaacagatggcagcggagtatgaggagcacgcggcgaaggcgcagaccgaggcggggagcaagctggcagcgatcatgcttcggagtgagcttgagaatgtggcggcggtattgaaggatgcgacaggctgggaggagccggatttcttcgcgcttgcatattatctcggacatgagaaccggggatccttgcgggagatggagaatgcgcagcgcaacagctatctggtggattactgcggcgagcgtttctggaaccggtttctggaactgtgccgccgggcagaggcggagcagatggtgcgttttatgacgcgcaagtatatttacaacacggaagaaagcccgtcaaacagttaaaaaatgcagaagaacggacaatatagccgcctggaatacgcaatataacctatggttattgaaaaagacaaattgcataatcatacgataaaataaatcaagaatttggtgtaattttaacattgtgaatcatctctaattttgctattatttcagaaaagataaaggcacttgagggaggacaatattatgaagaaagcattgagtgtattgttgacagcagcgatggctgcaagtatgatggcaggctgtggaagctcttccgacggagcagcatccggtacgaccacagataacggcgcagcggcaggtacagagagcgcaggagccgcagcggcagatggcgcggcatttaagattggcggtatcggaccgactaccggagcagcagcgatctacggtacagcagttatgaacggagcacagattgctgttgatgagattaacgcagcgggcggtatcaacggatatcagatcgcatataagtttgaggatgaccagcatgatgccgagaaatccgtcaatgcttacaactccttaaaggattggggtatgcagatgctgatgggtaccgttacaacgactccctgcgtggcagttgttgagaagaccgcagaggacggcatgtatgaactgacaccgtccgcatcttccacggatgtaatcgataatgataatgtatttcaggtatgctttaccgacccgaaccagggtactgcatccgcacagtatatcggtgagaacaagctggcagccaaggttgcagtgatctacgacagttccgatgtatattcttccggtatcgaggcgaacttcgtaaaagaagcccagaatcagggacttgaagttgttgcagaagaagcgtttaccgcagattccaagacagacttctccacacagcttcagaaggcacagagcgcaggtgcagagcttgtattccttccgatctactacacagaggcatccatcatcctgacacaggcagacagcatgggatatgctccgacattctttggatgcgacggtctggacggactgcttggtgttgagaattttaacacagagctggcagagggcgtaatgctcttgacaccgtttgcagcagatgcagatgatgagaagacacagtcctttgttacaaagtacaaagaagcatatggggatacaccgaaccagttcgcagcagatgcttacgatgcaatctacattatcaaagcagcggcagagcaggcaggcgtgacaccggatatgagcgtggcagatattggcagtgcacttgaggcggctatggcagagatcagcgttgacggtttgactggtgattccatgacatggcaggcaaccggcgaggtcagcaaggcgccgaaggcagtcgtaatcaaagccggtgcttattcagcaatgtaatagagcaggcaggaaaggccaataaagaggttggcgcgttggcgggggcgactacccgccggcgcggaacctcttcttttttcggttttaagttgtatacaggtatgtaacatgttataataagtgaaactgctgacgttttaacgtattaaacaaggaaagacagaggtgttgttatgaatttcttatcctatctgatcaatggaatcagtctgggaagcgtatatgcgatcattgcactcggctataccatggtatatggtattgcgaaaatgctgaattttgcacatggcgatgtcattatgatcgggtgctatgtggtgttccttgcaatgagcggccaggggatcagcccgcttccggcggtggttctctccatcatcgtatgtaccgttctcggaattgttgttgaaaaaattgcctacaagccgctgcgaagagcaacgccgcttgccgtgctcatcacagcgatcggtgtcagctatttcctgcagaatgcggcattgctgctgtttggagcggatacgaaatcattcagttccgttgtgtccctgccttccttaaagctggcagacggcgcgttgaccatttccggcacaaccattgtcaccgtgctggcatgcgtggtgattatgatcgcactgatgctgttcattaagaagacgaaagccggacaggcaatgcttgcggtatccgaggataaagatgcggcacagctcatgggagtcaatgtcaatgcgacgatttccctgacctttgccatcggttccggacttgcggcgatcgcaggtgtgctgttctgttccgcgtatccgacgctgacaccgtacaccggttccatgccgggtatcaaagcatttacggctgctgttttcggcggaatcggatcgatcccgggagcactgatcggcggaattctccttggaattattgagattctgggacgtgcctacatatcctcccagctttcggatgcgattgtatttgcggttttgattgttgtgcttcttgtaaaaccgaccggaattcttggaaaacagattcatgagaaagtataatgcaaaagggagaacagctatggcaaagttaaatttaaaaacggtgaataaaaaaacaaaagaccagctgatcacctttgtgttggtgattgcggtatatattgtggttcagatcatggtagctgccggagcaatttcttcgctgatgcagggactgctcgttcccatgtgcacctactctatcgtggcgatcggtctgaatctgtgcgtgggatacctcggagagctgagtatcggtcatgcgggcttcatgtgtgtgggagctttttccagtgccttctgcaccaagatgctggaaggtgtgatcggcagccagattgtgctctttatcattgcgctgctcgtgggcactgcgatggcggcattcttcggatttctgatcggcattccggtcttacgtctgcgcggcgattatcttgcgattgtgacgctggcgtttggtgagatcatcaaaaatatcatcaacgttctttatatcgcaaaagacggaagcggattccactttgcaatctcgaacggaaacgcgattgatctcgcagatgacggtgtctggctgattaacggtgcgaagggaatcgcaaagattccgcatctctccagctttacagcgggcgtgatcttaattctgatttctttatttgttgtatacaatctggtcaattccagaagcggccgtgcgatcatggcaatccgtgataaccgtattgcggcagagtctgtcggcatcaacatcaccaagttcaagctgatggcattcacgatctctgcggcgattgcgggagcgggcggcgtgctctatgcgcacaacctttccacggttacggcgacgccggcgaacttcggctacaatatgtccatcatgattctggtattcgtcgtacttggtggtatgggtaatttccgtggttccatcattgcagccgttcttttgacccttcttccggaggtgttaagaggactgtccgattaccgtatgttaatctactcgatcgtgctgatcgtcatgatgcttttcaactgggctccgaagtgcattgaatggagacagaaaatggcacagaagttccgcaaaaacacaaagaaggaggcagtatagttatggcaatgttagaggtaaagaatcttggcatctccttcggaggacttcgtgcggtagatgattttcatatttccatcgagaagggacagctttacggtctgatcggaccgaacggtgccggcaagacgacggtatttaatatgcttaccggtgtgtatacgccggatgagggaactatcagcctggatggtgcggatatcacaggaaagaaaacgatcgacatcaacaaggcaggtattgcgcgtacatttcagaacatccgtctgttcaaggatcagagcgtgcttgacaatgtaaagatcggactgcacaaccagatgtcctactcgacgctgaccggaatcttacgtctgccgaaataccgcaaggttgaggcggagatggatgagaaggcaatggaattattaaaagtgtttgatctggagcgcgaggcgggtttcctgtcctccaatcttccatacggaaagcagagaaagcttgagattgcgcgtgcacttgcaacgaatccaaagctgctgctgctcgacgagccggcggcaggcatgaacccgaacgagacgaaagagctgatggaaacgatccattttgtgcgggatgagttcgatatgacaatccttctgatcgagcatgatatgaaactggtgtccggtatctgtgagaagctgacggtgcttaacttcggtcaggtacttgcggagggcgcgacgggtgatgtacttcatgacccgcaggtaatcaaggcatatcttggagaatgacatgagatagatggaggaacgactatggcaatgttggaagtaaaaaatctgaaagtacattatggtgtcattcaggcaattaaggggatctcgtttgaagtaaacgaaggggaagtcattgcgctgatcggagcgaacggtgcggggaagacgacgacacttcagacgataacgggaatgttaaagccatccgagggtgagatcctttttgagggacaggatatcgtgaaggtgccgggacataagatcgtatcgatgggaatggcgcatgtgccggagggacggcgcgtgttcgcggaactttccgtctacgagaatctgaagctgggcgcttataccagaaaagacaaaaacgagattgcggaatcgctggcaaaggtttacaagagtttcccacgtctggaagaacgaaaaaaccagcttgcaggaacgttaagcggcggcgagcagcagatgcttgcaatggggcgcgccctgatgtccaagccgaagatcattctgatggatgagccgtccatgggactttccccgatttttgtggaggagattttccatatcatccgggagatctcagcgagcggtacgacggttcttctggtggagcagaatgcgaagaaagcgcttgcgatcgcaaaccgcgcgtatgtgcttgagaccggaaatattgttctctccggtgacgcgaaggaaatgatgaacaatgattctattaagaaggcatatctgggagaatagacggaaaatgcagggaggtagaatggaatgaaaaaaacagtcattaccattgcgagaagctatggaagtggtggaagaacactgggaaagcttttggctgagcagcttggaatcaactgctatgacagggaaattttaagaatggcatcggatgccagcggcatcaacgaggcacttttcggacaggcagacgagcggttgaagcggtctccattgtttggaattttgaagaaaaatccgtacaagggtggtgtgattccgccggagaattcggattttgtgtccgatgataacctgttcaattatcaggcgaaggtcatcaaagagctggcagcgcaggaatcctgcgtgattatcggccggtgtgcggattatttactccgggatgatccggatgtcatcaaactgtatttctgtgcgccgaagaaggactgcgtcgcacgagtgatgaaccagaacggcctctcggagaaggaagcggagagacggattgagaaaatcgacaagtaccgcgcggaatattaccgctattataccggaagagactggaatgacgccagaaattataatttctgtctggacacgacgtccatgagctatgaaaagcttgtggaagtggtcacaaattttattcagatttaccagaaatagaatccatgctataataaaagtgttctgccgcatgcaagcggtgggacacttttttcgcttcacaggaaaggtgtcctgggaagcaaaaacattacaggaggggaataatgacaacagaatggtcgttagacgaactttataaaggatttgatgatccggcatatggaaaggatgtggcagagcttacggcgcagatcgatgcgctcgccacactgcttgcagatgccggaaggatgcaggaaaaggaaaggacagagaaggtgcttgcggcgcagagcgggatcgcacagcttttctatcagttatcgctctatgtggaattgagacagtccgtcaatacagaggacggcacagtgatggcagaaaatgcgaagctgatgaagcttcaggcaaaaatagcaccgttagaggccgcggcaggaaagcttttagcgggaatccgggacgtggatgcgctggcaaaagagagcgggcttgtgcgtgagcatacattttacctgaaagagaagcagaaagaggcaaagcatctgctcagcgatgaagtggaggagatggctgcctccatgaacatgagcggcggcgcggcgtggtcgaagctgcagtcctatctgacctccacggtaaaagtggattatcagggaaagcagattacactgtcggaagtaagaaacttagcgtacagcccggaggcttccgtgcgcaagagcgcttatgaggcggagattgccgcttatgagaaggtggaggatgccatcgcgttttccctgaattacattaagaaccaggtgacgatgctcagcgaaaagagaggctatgcttcaccacttgccatgacgttagagcagtcgcgcatgaaacgagagactttagacgctatgatggcggcgatcgacgaatacctgccggtattccgcaagtatctgcggaaaaagggcgggatgctcggacatgtcaacggcctgccgtggtatgatctgtttgcaccgctcggcaaggcagataagacctacagcattgaggaggccaagcagtatcttattgatacattcacaaagctgacaccggagatggcagatctgatgcgggaagcgtttgagaacgagtggatcgatttctacccgagaaaaggaaaagagggcggtgctttctgcgcgggagccatgtggttaaaacagagccggattctgaccaattacgacggttatttcggatcggttgacacgcttgcacatgaactcggacatgcattccacaaccgccagatcgagaatcacgcaccgcttaatcaggactacccgatgccggtagccgagacagcatcaacctttaacgaggtgcatctcggaaaggcagcccgggcagaggcatccggagaggagcttttgaatctgctggagaacgacatcaaggagcagacgcagtgtatcgtggacatttactcccgctatctgtttgagacggcagtatttgaacagagccagaataagttcctcatggcggacgatttaaagcagatcatgctggacgcgcagaagaagacgtacggcgacgggctggacccggaatgcatgcatccgtatatgtgggtgtgcaagggacattattacagcgagggactgagcttttacaatttcccgtatgcttttggcaatctgtttgcgcttggactttacagccagtttgaaaaagagggggaggcttttattgggaaatataaggcaatgctttcggcaaccccgtgctgcacgatcgaggaggctggcgcaatgatgggaatcgacctcacaaagaaggatttctggagaacgggactttctgagattgcggaagagattgagcagttctgcacgatgtagaaggagatgtgttatggaagatttaaaacagatcatgccgaagaagcttgggtttggctgtatgcggctgcccgtcgcaaacggcaatagcgaagagattgacgacgcggtattctgcaggatgattgaccgctatatggagcagggatttgtctattttgacacggcatacccttaccacaatcagaagtcggaggaggcagtgcgtcgctgtctggtggagcgttatgacagagagcgcttccttctcgcagacaagatgccggtgtggctggtacagaacatggaggactacagcgagatctttgagaggcagctggcgcgctgcggcgtgacttattttgacttttatctgtttcacgccatgaacaagacacgggtggaagagacagagaaaacgggcggctttgcgtttgtgcagagaatgaagacggaagggcgcatccgccatatcggattttcgttccatgatacggcagaagcgctcgaggagatcctgaaaaatcatccggagatggaatttgtgcagcttcagatcaattattatgactgggagtcggagaatgtgcagtcccgcaaatgctatgaggttgcccaaaagtatggtgtaccggtgatcgtgatggagccggtaaagggcggaacactcgccaacatgaccggcagaccggcagagatcttaaaggagctttcaccagaggcaagctttgcatcttacgcgatccgctatgcggcatcactggaaaatgtgatgctggtgttgagcggcatgtcggacgagcagcagctcatcgacaacacggcttatatgagggagttcagaccacttgatgagcgggagcgcgcagcgatcgcccgggtggtggaggagcttgccgccatgccgacgatcgcctgcaccaagtgccgctactgcgtggagggatgtccgaaaaagattccgatcccggatgtctttgaggattacaacatgaccgtgcagttcgggatcaatgagacaaaccgcggcagttaccggcggcataccgctgacggtggcagtgcggatgtctgtatccgctgcggcaagtgtgagggacaatgtccgcagcatctgccgatccgcgacctgcttgtgaaggtggcagagacatttgcggagtaaatggagttctgttcgtttggctatgcaggtttgatggaataaaaaagttgaaaaaggacaggtgaaggatgccagagcaacaggacgggaattatcaaaataaactgtaagatatttccaagatattagagccagtcaatgtactggctctttttgtgcatttcatctgtatatcgttagaatttcagaaagaaatagaatattttgaccatataaatataaaaaaactattaaaattgttaaaaatgtgctaaagttaataaaaatgtacggtttccattgtgaggatagaactttataattaagacataaacaaagccgccggatgaagcgcggcgggaggagaagaaggaggatttttacatgaagaaaaaagttttatccgcactgttatgtgcagcaatggtggtttccatgaccgcctgtggactgaaagcgccagaggctgccgacacgacgacaagccagaacacagatgcagcggcagatgcaacggcagatgcaacggatagcgcagcggcaaccgaggccggtgattccacaggaacagagccggtcggaccggcagtgactctggtatacgcagaggtaaacccgctggagggaaccattgtaggacagacagcaaccgcattcaaagagaaggtagaagagctttccggcggaagtattacgattgatattcaggcaaacggtgttctcggtgcagagtccgatgtactcgacaccatgctcggcggcggcggtaccatcgatatggcacgtatttccgcattcgcactcacaagctacggcggagagaaatccagtctcttatccgtaccgttcacattcgtaagccgcgatcatttctggaactttgcaacctctgatctggcacaggagttcctgcttgagccgcatgagaacggaaccggtatccgcggactgttctacggcgaggaaggtttccgccatttcttcaccgtcaatccgatcgagggaatggatgatctggcaggcatgaagatccgtgtatccaacgacccgatcatgacaggtatggtggaaggacttggagcaaacccgaccgttgttgccatgggtgagttatattccgcattatagaccggtgtggtagatgcagcagaacagccgatcgcaaactatcaggcaaatgcattcccggaagtagcaccgaacatcattcttgatggacataccttaggagcaatccaggtagttatcacagacgaagcatgggattccctgacaccggagcagcaggatgtgctgaccgaggccggcgagtatgcttcccagtacaaccgtcagatctcccaggagacagaggataagatccttgaggagttaaaggcagacggcgttaatgttattgaagtagacgatatcacaccgtggcaggatgcctgcaaggatgtcatcgaagaggcaaccaagaataacaaagagttatatcagcagatcgttgatatgcagtaatcgacagaaagattgacacttataggtttgatagaaggaaaacccgcaataatgtaagtgcgttttcaaggggcacagggagaatggctgctcccccgtgccccgacttttttaaggaggaaaaaatgcctaagatttttcagactttagataaaataaagccggcatatgatgtggcatataagtttgtactgtttgtatgcaaattgctgctcacggcagatatcgtaatcacgagtgtctgcgttgtcggaagatatgtttccttcgtacccgatccggcatggagcgaggaagtggtactgaccctgatgtcctacatggcagtgctctcggcggcacttgcaatccgcagaaatgcacatatccgtatgacggcgtttgacgcatacctgccgaaaaatgttattaaggcattggatattctggcagatgtcgccgtctttattctggcgatcgtgatgattaccgttggattcagctatgcgacaggcattggagccaagggtaattacgtcagcatgccgtggctgtccaagttctggatgtacttcccgattccgcttgccggcgtagcgatggtcgtttttgaactggaagcaatttataatcatattaagagtatttttgtaaaggaggggacgaaataatgagtgtacagagtatggcaatcgcagtgttgctcgtaagctttcttgtcatgattctgctgcgtttcccgattgcatatgcagtagcgttatcttcccttctgtgcctgttatcgcagggacttccgctgacaacgatctgtcagcagatggtaaagggaatcagttcctttagtttgatggctgtaccgttcttcatcacgatgggcgtgctgatgggcaccggaggtatatcagataagctgatcgcactcgccgatgcctgcgtaggctggatgaccggtggaatggcgatggtaaatatcgttgcatcctatttcttcggcggtatttccggatctgcatctgcagatacggcttccatcggaagtatcatgatcccgatgatggtagatcagggatacgatgatgatttttcgacggcggttacgatcacttcctcctgtgagggactgctggttccaccaagccataacatggtaatctatgcaatgtccgccggcggtgtatcggtaggaagccttttccttgcaggatatgtgccgggcgcactgcttgcgatctccttaatgatcggatcttatattatctcgaaaaagagacattatccgaagggggataagttcagtgtcaagagactgttaaaacagcttggaacttctttctgggcattggcagcagttgtaatcgtagttgtcggcgttgtagccggatggtttaccgcgacagagtccgctgcgatcgcagtattctacagcttgattgtcagtgtatatatttacaagggtcttacctggaagggtgtctggaagagcctggagcagtgcattgatacattgtctatcgtcctgatcttaatttcgacatccagtattttcggttactgcctgacgacacttcatgtgccggatctggctgcaaaggcaatcatcggattctcgagcaacccgatcgtgattgcactgttagtggatttgattctgctcattttaggatgtatcatggatatggcaccgatcatcctgatcgcgacaccgatcttacttccgatcgcaacctccatcggtatcgatccggtacagttcggtatcatcatggtattaaactgtggtatcggccttctgacaccgccggttggatcagttcttttcatcggttctgcagtcagcggtgtaaagatggagcgcgtggtaaaagcaaccctcccgttctatctgtgtatgatcgttgtattattacttctgacctttataccggaattaagtatcggacttccgatgttacttggaacgtaaagggagccagtttgtgaatacagaggagatggcatatggaatatcaatataagtgcagaattacggcatgggattttttccggcttaccatgcgtcagacctaccgctccatggcggggatgtgtaatctggtatttacggtggcgatgatccttcttacggcaaagttctggagtcagtcgggggaagtcctgcaggttctgatgctgatcggatgcctactgttcccggtcatccagccggcggcaatctatgcgaaagccaggcgtcaggcggcggctgtaccgcaggatgtcaggcttacctttgatgaaaaggggctgctcgttacaaccggaggagagagacagcatctgccgtggaaccggctgcgggttacaaaacagccggggatggtgctggtgctttcgggagccggaagcggctatatgctgaccaaccgtgtgctgggagccgaccgggaggcgttttggtcctttgtacagagcaaagtggaacagaatagataaagcaaatatgcaaagctgtatttacggagtgtgtatctacggctttgcttttgccgcattatagagagaacagagaggcatgggaaaaacaagcgtgagaaagaggataaaacagttctggcaggcacttacgatcaaaaagaaaatagcgacgtttaccgggacagtatttctcatcattgcagtctctgttctttttaatgtatgggttgtcaagttttccctgatcgactttaaccggattttacaggataacgcagcggtgagcgaactggcacaggcgctcgaggaagagagtatccagtttgagacatacataaagggcaatcgcgaggagagagaaagtctggatattgcgatagaacgaaccggaagagcggtggaaaagcttccgttccgctattctgagattggagagcagcgctacgcaaagacctggtcgatcaagagctgttatgaagtctattgccagaagcgggacgccatgcttgcgatgggggaaaatgcgccggactatatcaagcgcctgtatgaggtctacgagatgcaggactatctcgaggaatacgcggcgacgctgatgaatgagacgatcgaggacggcgacggcctctatcataaaaaggtgcccatgctcatatgcatgccgattgtggttgtggtatctgggattattctcgtaaccggcatgatggagctggcggcattgatgaaccagaccattatctcgccggtggtggcgctcgtgaaagcggcgcagcgcattgccgccaatgattttttctcggaggacgtgcaggtgcagaatgaggacgagctgggggaactggtgcatgcgttcaacaagatgaaatacgcgacaggcgagtacattatggcgctggaagaaaagaggaagactcttgatcttctgcatgaggaggagctgggaaagctggagacggagaaacgcctggagatgataaagctggaattgttaaaaagccagatcaatccgcattttttgttcaacacgctaaatgtcatcagcggaatggcaaagcttgaggaggcagagacgaccgaaaagatgattctggcgctcagttccctgttccgttacaatttaaagacacccgaacagtccgttccgctggcaaaggaactgaaagtggttgcagattatatgtacctgcagcagatgcgcttcggggagcggatccgttatgaattaaactgtaaggtggaacaggaactggtcatggttccggcatttacctttcagccgcttgtggaaaatgcaattatccacggagtttccccgaaggaggaaggcggaagcatccgcattgtggtcagacagaaggaaatgcggctgcacatagtgatcggggatgacgggatcgggatgacggaagaggaactgcagcagttaaagagccgccttaagacggacgatgccagacacagcggaatcggtctcggcaatgtgtaccggcggatcactgccatgtatgcggacggaaattttgagatatacagtaaaaagaatgcgggaacagtaatttttatagatattccatgcagagaggaaacgggggatatgacatgaaacgagtgctgatagcggatgatgaaccgattgagagaatgattgtaaccagaaccatccagaaatatttcccggaggagcttgcggttgtgagtgcggtcaatggaagagaggcggtggaacagttttttgccgagaactgccagattgcgctgctggatattgaaatgcccggaatgaacgggctggaggcagcggagcagattcgagagagagataaaaactgcagtattatttttcttacggcatttgatgaatttaactatgccaagcgtgcgattgccgtccgcgctatggaatatctgctaaagccggtcgaggatcaggaactggaggcagtgcttgcggaggctatacggattgccgatgagcatacggatgaccgggaggcaggagagaagaaggaagatgagccggtttttgccgaacgggactgtcatgaggacgcggcggatacggagcgctcgagaatccggctgcaggcggttgccgggaatatccaggcgttcattgaacacaattatatggacgacatttctttgcagacggtggcagaggccatgaactactccgacgcctatttctgcaagattttcaaacagtgttttgacaagaactttattgtctatctctcggagtatcgtgtggcaagggcaaaagaactgctgggtgacgtccttatcaatgtaaaggatgtgagccagaaggtaggctaccgtgactccaactattttgcgaaagtattcaaacggattgccggcgtcacgccgacggaataccggacgcaggtattaaaggaggcgggggagcgatgagacggatatgcgcggcggcagctgtggctggaatgttgatactgctcacactgtctgcctggagaaatcacacgtatccctccaagacagagatggaaccggaatatgtgttttcctatgcggaaaatcagccggaagattatccgacgaccctgggtgccaagtattttgcagagcttgtcgaggagcggacaaatggcaggatacggattctggtgcagccggtcggagtgctcgggtcggagaataaagtcatcaaacagatgcagtacggcggtattgattttgcgcgggtgtcactggcgcagcttgcggaatatattccgagcctgaatgtgctgcagatgccctatctttatacggattccgaccatatgtggcgggggcttgacggagagatcggagatgcgtttctggagagtgtcagcgcggatgatgtcatcggtctgtcatggtatgatgccggagcgaggaatttttataactctgtgcagccaattacctgtctggaggatctgaaaggcatgcggatccgtgtgcaggagtcggatcttgccgttgatatggtggaggcgctcggcgccacggcgattcccattgcctacggagatgtttatgccagcctggaacggcaggtggtggacggagcggagaataactggccgtcctacgaggcgatgcggcactatgaggtcgcgaaatactatacggtggacgagcacagcagagtgccggaaatgcagatctgctcggcgtatacctggcagaaactgtcgccggaagaccgggagattattctggaatgtgccagagaatcggcgctctacgagcgtgaggtgtggacacagcgcgaggagcagtcgcgcagcattgccattgaaaatggcacgaaagtggtggagctttccgcagaggaaaagaagcggttccagaatgccgtgtacggggtatatgaaaaatactgcggggatgatatgggactcatcgaagaaattttaaaagaaggatcgtaatgcggcaggcagaatgtgcagacggccggggaaaatgccgcatacagataaaaccaaaaagagaaagggagatggagcaatggagaaaacagtaaaaaatcaggtgtggaactttaatgacaggatcgatgccgaggtgtgtgctgagggtgtggaacgcaagattttagcgtacacggatgaactgatgtgcgtggaaaaccacttcaaaaaaggagcggtcggcgcactgcatcatcatccgcatacgcagatcacatatgtggtgtcgggcagctttgaattcgagatagacggcgtcagaagagtcatcaaaccgggcgacgcactgttaaagcgcaacgatattgagcacggctgcgtctgcctggaagacggcatcctcttagacatctttaccccgatgcggcaggagtttgtataaaactaatcccgccggaacaaatctctcgtgtagactttgtcttttacatcatcgagacaggaatcatagcggttggcgatgatgctgtcgctaatcttcttaaactcgtcgagccggttgaccaccttgcttccgaagaaggtggttccgtcttcgagtgtcggttcgtagataatcacggaagccccctttgctttgatacgcttcatgacgccctggatactgctctgccggaaattgtcagagttggatttcatcgtcaggcggtagacgccgatggtgaccggatgctccatgccggaattgtaggtgttggcggaagcgtagttgtagtatcctgccatctgcagaacgcggtcggcgataaaatctttgcgggtgcggttgctttccacgatcgcgctcatcatgttctgtggaacgtcattgtaattagccagaagctgtttggtgtctttcggcagacagtaaccgccgtatccgaaggacgggttgttgtaatgcgtgccgattctcgggtcgagacatacaccgtcgatgatgtcccgtgtgcttaaattttttgtctccgcataggtgtcaagctcattgaaataggacacgcgcagcgccagataggtgtttgcaaaaagtttgacggcctccgcctcggtaaatcccatgaaaagtgtcgggatattctccttgagggcaccctcctgcagcagtgctgcaaaattccttgaagcgaccacaaggcgctcgtcgtcggagtcggttgagacgatgatccggctcgggtagagattgtcatataacgccttcgactcgcggagaaattccggactgaagatgatgtttgtggtgtggtatttttggcgtaccgattccgtgtaaccgaccgggatcgtcgatttgatgaccataatcgcgtccggattgacggagagaaccagttcgatcacggcctccacagcggaggtgtcaaaataattcctggcgctgtcatagttggtcggtgcggcgatgatgacgtaatcggcgtccctgtatgctgcggcgccgtctaaggtggcggtgagatcgagatctttttcggcgagatatttttcaatgtaatcatcctgaatcggggatttgcgccggttgatgaggtcgactttttccggaagaatgtcgaccgccgtcacatggttgtgctgcgcgagcagggtggcgatggagagaccgacgtaaccggtgccggcaaccgcaatgcataacggtgacggggaggaaagcctgtcgtgcgcggtgtcggcgaagacgctgtccggctcaaagccgagcacttctcccagctgttctaactgcgggatggacgggataaaatcctgtttttcaattcttgagatcagggcgcggttgatcccggtcgcctcagcgagagcctgctgcgtcatggacttctcttttctcttgctggcgacgaggtccgccagaatcacagatgataatttcttcatgaaatctcctccttgcgtgttattttaaataaccatatctggaaaaataatctgataaaatcataccacaaggcgaaaataaaagcaatattggataatgatgatatttaaaataacaacgcgaagacaaaaaagggagtggatgtagaagaactgtaccgtaggggaaagttctggttgagaaacaaaaaagaaaacactataataagaataagtggggcgaagggctctgcatgaatgacaggaacaaaagaggattggaataagggggaagctatgggcggactgatatggatcatcgtgattgtagtggtgataagtgagataaagaaattccagagaaagaacggacagcgtgtgaaaccgaatgtgccgcggcagcagcagtacatgcgtccggatcagacgaaggtaggacagcagaatgtgcgcccgaatcagatgccgcggcagcagcagaacgtgcgcccgaaccagatgccgcgccagcagcagggcatgcgcccgaaccagatggcggggcagcagaatgtgcgcccgaaccagatggcaggacggcagaatgtgcgcccgaaccggatgccgggacagcggacgcagagtgcaggcggggctgccatggcaggctgccgcagaccgcagcctaatcaggcggagaatgacatattaaaacgtgccacagagaatgtgagcgagaacgatggggatgaactggagcagcagatgatggcgggagcacacgaactcgtcaacgcgatcgatattgacagtgccagtgaactgatgcatgaggtggaggatctgatgattatgggttatcaggcaaatctgccgtttgagcgcgattttatcgcggagggagtggcaatgctgaacggttatgagctggatatgggtgcataaagatacggcaggacagcaaagagggacagaaggaaggttacaggaatggaaagagtgagaatcccgcagagcggggagatctatcgtcactttaaaaacagactttatcaggtcatcgcagtggcaacacattcggagaccggagaaaaactggtcatttatcaggctctctacggagattatcaggtatatgcgagaccgctcgccatgtttgtgagcgaggttgatcgtgaaaaatatccggatgcggcgcagacctatcgttttgaacgcgtggaccggagcgaacttgcgggcgctggcagcggacgcatggagcgggctgaggcgcggaagcaggcacaggcgacggcatcgtttgcggacgaggtgcaggagacggaggcagaagagctgacggatcagatccgggtaagccagatggagcagtcgctttccgatgaggtgaatccgaagctgatgcagttttttgacgctgatacgctggaggaaaaatataatattctggtgtcgatgcgggatgaggtggacgaccatctcatcaacagcatggcggttgtgctggatgttgtgattccggagggaccggtggcggaccgctatgagcagttgaaagcctgcatccgcacaaagcagcgctacgagacgcagcggatgcgctgaccagatacgagagcaggagagtacatggaagaacagatggaaaaattatctgcgattgcgcaggccaaaccatataaaatcattatcagcaaaccggcgggtggggagatcccttaccgccggattgtcattgagcgcaaggaatcctattaccaggcggcagcctacacggaaaaacaggtatttcacgagaacataccgcccgagaagctggcggaatatctagggaaaacggccgtggggcagtatctgcaggtcaatgcctgggatgatgccgcagagcatatgtacctgtgttctaaaaagggaaaagtaacctacaagacgaaaaagaatgcacagacgacggcaaaggcaagcgggagccacaaccgcaaggcggtaattctgtatcatctcggtatcattttcggggtttttctgccctgtaagcccgttaaaaaatcctttggtattggggatagggtacggggcagcccccttgttctgtataggttcgggtacattttggggtggtttttatcgctcctgttcctgccttttcacaggcttgcgctcccggcgtaaaatctggtcgatattgcccttgacggtctgtaagcggcggtattcctcccgttttgcccggtaatcgttgtagccgctgtttttctctttgataagggtttcaatctctgcttgcagggctttatagcttggcagcttggaaatgccgttctccctaaaataacgggcggctgcgtctgctatgataaagtcgctttcgtgcttctgtcggtaggctgcttttgctttggcgtttttctgctgtttcagcccgtcccggacagggcgggtcttggaataggcaagcacctgccgttgcagctcctttttcccgtccagcgtcttttccacctgcttcagctctgtaaggctttcccgcatggcggtataggcggcagaacaggcttcgtccagttcctccggggaagaaaagccgtactgctgataggcggtaacggtagccgccatttgctttagattgtactttgccgcccagcggtcatagcccaccttgccctcggctcgcttggcttcccggtcaaccatgcgctgcaaggtgttgtctgccggggtggtttttgtggttttttccccttgtgacggctttttaactgcggcagggtattcgggtatggctttggtctgttcggcggctctgcgggcgttctgtgtaagcagggcaaggacagtagccttgtcaaaatcgtcccccagcttccgggctgtgataagctttgtcctgtccggcgtgaggtaggaaagccgcccccggctctccttgacagtcacaccctcccgcagcaaaagggaagaaaactcgtcaaagctggtagcttgggaaagtgcctgccgtatcgtccggcgcagcttcgccttgtccatttcaaacttggtgggcttggtcggctgtccggcggcttctctggcggcgttctctttatcaagggcaagctgccctttctttgccgcccagtattcccgttccgttatccgttccttgctgccgttcaagaggtcgatttggtaaagcccctcccggtggcacatctccatgacttcactcttgaaatattccatagcggcgttggtgcagcggtgcttgcagccctcccgtgtatcggctggtctgtccatgtagggcagaagcgggacttcataaatccgcagggagttgatgacgatatgcacatggatattgccgctgtggttatgcccgtccgggtgggtgcagattagggcttggtgtccgggaaaatgctccttgcagaactgctcgcccagctcctgcgcccagtctacggtcaatccgttgtctgtcccgtcccgtgggtcaaagctgatgatatagtggtggctttcacatcttcccgtttttggtttttctcatagcggagattggctcgcatacaggcaacagcgaaatcctcgccctcgcagttgagggaagaaatgcggtaatcctccctcggtatcagccgcccattttcatcaagggtgggcttcatggtaaactcgtcatgctcaaatgtgaggtaggcttccgctgcgccatagtcagcatttttagagctgatatgtttgaatgttgccaacagcgtcacccactttctgcaagacttcaaactttagggcagcaaggtcggaaaccgccgcccgtacctccccggcaagctgcgggtaggggctgtgccactcgttcagcgtccgggctatctggtttaagttgccgccgatcctgccgtattcggcggttagcttcccgacggcggcaagcagctcgtcgttgacgggggaaacggttatggtggggcgtatggctgccccggttatggcttgccggataaactcggcttggctcatgttgtaagcagaaagcctttccgcaaactcggcgtattcttcctcggtcatgcgtgtcttgactacccggctgcggtgcggcgtgttatatcgttttcgcatggtaaaacctcctttcggctgtgcgtggtgtcctctcactaataggagaaaaacagggtgtaaagcggaactgtttttgaaaaatccgaaaaattattttgagggatttttcagcggcgcaagccgcataagcagggtttggggaaggcactccccaacaagattcccgcaggggcaaaatgagcgaaaagcgaattttggtactgcggtagaatcttgctctaagaaactgccggactgccgttcacttgctactgccacttttttgagaaatcgcaaccagcttttttcataaagagctgttggattgccctcacttgctactgccactttttcgggaaatctataaccagcttttttcataaaaggcggcgggctggcattctcccccttactccctacaaaccataaaagagcagaatggacggactttccggcaaggactttttcggcggctcggtctttcccgacaataaggcgtttcggaagctgcgttttgcccgctgtatgaaaaaatggcagcctttttgggcttcactgtctaatacggaacttttggaaatttgccaaaaatgggcgcaaaaaaagcagcaaatctttttcggatttaatgcttcgtgtgccgctgcggggcggcggttattcagttgtaaataaaagagggcggtagcactttgggctatcgtcctcttgactgcatatttgcaaagacaggcggggctgtcaacggtgggcgaagcccatttacttgccgttgactggctcggctggatttgctatcaattattgaattgaatagtctttactttttcttcggaatcagcacaaacccacaaacaagaatatatccaataattgcgattatagatgcttctattccaaaccctgctcctgtaaggaaaacattatctgaagatattattatcgaaaaaatcggacttccataagttccttgcgctgtcgtaatatggagaatatctgttatcataataaagttccatgcggcgtgtaataaggcactattacttatggattttcctttgtaggaaacaagagaaaacatgattcctactactgtaccgctaatgattaaaagcagaacaccgctaacagtaaaggtttccattgagggaatgtgtactaaactgaaaagaaacgatggaattaaaattgctatatatttattccatctgctctccaataatttcataatatacccacgaaacaacatttcctctgttattcccgactttagtgctataagtatggaagctattataattaaacatatttcacccgccgacaaagagttgacttcaaatttaccaatcattgcaaaaatagctgtaacgaatactggaagaaaaacagatattagaacaccccatttttttatgttcggtgtaataccaaaatctttcattttcaagtggagtccttttgttgtataaagccaaaaaaggaaagcggttagtaataaagcccccaacattcttagaattacatatagtgcattgctcggaagttccacaaacgaaaaaagcaaatcaaaagaaatactgctaaataaatctcctgccaaaaataacagaaagtaaacaaggatatttacaagtgttttcgatgtcgaaaaattatattgtgtttgattcaatgatggttcctcctcaaaaaaatatctttttgctgttatattgtatcattttcgacaataaatttctactaattttacggaatagcaagttgctgtctatcaatttcttgtgtgttactttatcgcacatgagcattggcaccagggttgtcgttgccgtagccttccagcaggttgatcgctccccagatgccgaggccggcacccagtgcgataacgagggtctgaagaacggttactgcgctgttgaaaaatgccataaatgtgtacctccttgtacgttgcgcccttatgggctgatgaatagtgattttccatctgcatgtgcacctgcaaatgggcaaacatatagccaggtctccaatcccaatcagaaacctggctatgtaaagaggcggcagctcgccgccccttatcttattctgttaccagcagcgtacccatgacatcttcgtcaccggaacaaacttatttggcatgatctgcatcaactacttcgtacttatcaccgggcttgagcttcagccgatgatcgagaaacgtctcgatgctgaacgtgtttttcttatcagcaccggcagtgagcttgtagttcggatgctgggtcagatcgtatttatctgacttgaacggtctgacaccgcgcagctgcaaaatgcactttccgccatccagcacagccagttcatccaccgaagccaggtcatgcccaaccttttggtaattggtgccgtaagatgggctgttgcctctggtatcggaagtgttgtacaaatcaatcgtttcttttcccaatgcctgattcagctctttcagcgtagtcggctccgaaccgccaaggaaaatacgagaatccatattgccgatgatggtatcggcattgtccttgtagattgccttcaactggctctgtgcctgaagtaccagacatgccgagatttctcttgatcggatggtggctaccagcttctccagatttggaatctgaccaatgttcgcacactcatcaatcaggcagcgcacatgcaccggcaatctgccgccgtaaatatcatccgctttctcgcacagcaggttaaacagctgtgtatagatcatcgaaatcaggaaattaaaagtcgggtctgtatcgctcataatgaggaacagagccgttttcttatctcccaccgtatccagcgacagctcatcgtacatggtgatatcgcggacttcctcaatatcgaagggagccagacgtgcaccgcagctcaccagaatcgactttaaggtcttgccagagacaaattgtcaaggactttttaatcaaattcacaaaaaatctacaaaaaaggtgccagaagcaatgtatggctcctgacacctcgtttgatagattacatttttccgttcagcaggtctttgcagagatacgcatagtctggcagctggttgatatatggcccccagcgccgcttgatttcggccaattccagcgaatcggcttcctccagtgcatgatcgttgcccgtcatatacaaaacatccatagcaacatcatccaaacacttgcagcagagatcggcggcagattctatcctgatgccagtatccacataaagcggattgacgccaatcgtcagccagacatagcctaccttgtccgaccagagcagttcaaaatcagggctttgccgcagatgttccgcaaagacctcctttactcgctcaatttcatgtttttctttttctgtgtacagcattttcatgtcctccttggctaaagttttggtgtgtaccatcatcagtttaacacaaggcggctagctttatcagccgatcacatctgctgtatctcgtttttaagcatacgcttgattttatcgctcatggtttcggtgctggtatcgctgaaatggacgcgcaccttgtaggttgtctttccgattttctttaccatcgccggcgtgttttccggcgctctggacgcagtagcggcgtctgacacctgcatagtacggggttctttgttcatggcgctcctttctccgaacggttctgtgccgcccggtaaaaaatcaatcgtgtttactgtttacaatgtcttttgctgtctgtcgggtagcaccggcattttcttcccggaaattcttcccgtcaaaaagaatcggcgcacaccgttccaaaatacggtcatagatacgagcgtgagccagatcaggcgggtttttcagctcggacagtttcaagtttgttgtgataatcatgggtctgcggctgcgatagcggctgtcaatgacgaaaaacatctgctccatagcatattcggtactgcgctctacacccaaatcgtcaatgataagcaggtcatactcgtcaaagctggcaataaactccgacctgtcctcagagaacatcccggtcaggcggttcagaattgtggggaagttcgtcatcagcactggcacatcctggtcaagcagagcgttggcgatacatccggcgaaaaaagatttgccggttcctacatccccgaacaacagcaggccggtgttgtttttatatgcctctttccagttctccacataggcgcgggccttgtccatcaatgggttttggccgttgtcgttggcaaaggtgtagtcatagagatagcggtcttgcaagccctgtgcctttcggcgtttgatacgctccatgcggcgctgccgttcttcagcagccttgcgctgttcctcggcctcctgctggcactggcagatgcagcggggcatgaagtagcctggttttccaaagcatggcacaacggtctgcctctggccgccgcacttcttacagtgaatgaggccgtctgccgggtctatgtactcgtccccggccagttccacaccggcggctgccttgtcgatcagcgcccggatttctgcggtaatctcaatcatacggtttcatcttcctttacgctgtaatcccggttgcgggtgggcggggctgctttcttcgcgtcctcaccggcccagcgccggatggtggcggcatggctctgataccgcttgccggtagaagccatgtactcggacagtttttcgatgtactgttcccatacagcaggaaagctggcctgcaagtctgccagttccccgtccgtcaggaaaacattctggtaacggccataggcgtgggcggggtgtcccttctctatctctctctttatctctatctctttctctaactctaactctatctctggtggacgaatgtcggacaaatgtccgccgtttgtccggggcgcggaaagagccttgttttggagcctcgcagcccgctttcgctcagcctcggtagaggactggccgattaaaagttcgatgttgctcatgtagaatgtgccgctgtccagcacttccacaaggcccagcttcaaaaagatctgcaaggctctctccacagtgccgatctgctggcgggtgatggtggcgatcatctgcgccgtgtaaggaatgtcctcgtcaagctgaagccgcccgccatgtttcagcgatttcagatacagcttgagcagaatgttggaatacaacacaccgtcctgcatactttccagcagcacgatagaatcatcatcaaaatagttttctttgagtttcaggtaataatattttctattgtctgacatagggttcctccttaggggttcttttgggattctgtacgcattttaaggctattttaggagtcagaggataaatctatcagactgcctttgacacccccgaaaaaagccttgatttacaagggtttttcagcccctaaagcgtgacatttctcccgttgtttccgcttgcgctttgcggcgttgatccgcttcatgcgtgcggcacattccgggcagtatttggctcggttggaaccgggggtaaacagcgccccacatacagcgcatttcttagcatttagccggtggaacagcgccgtttccagttccttatcctgcggcaataccgccgcccgaaaccacctgcacaacagggagtaggaaatagactggacacagacacattcctccccatcgtccagagcgatacagtttccgtcgatgtagttgcagcactcatgcaccagcctccgcgctctgcggtactggcggtaatccatgacggggataggttcagtcttgttgttcttcataaatgatttctttcatagtgcagctaacctccttgaatgaatttattgttaaatattcgtgcaaagtattgttttcttcgtgcaaatggcatatactataattgccagcagaaaggggttgatcgtatggctggaaataccacaaacatcagtatccgcatggacgcagatttgaaagcgcaggcggacgcactgtttacggaacttggcatgaacctgactacggcgtttaacatctttgtgcgccagtcgcttcgtgaaggcggtattccctttgaggtaaggctggaacagccgaacaaagaaacggttgctgccatgctggaagcggaaaggattgcaaaagacccgtctgtaaagggctataatgaccttgacgagttgtttgctgacctgaaaagatgaaagaaaccaaatataccgtcaagtacacgaccagtttcaaaaaagactacaaacgagccatcaagcgtggcttgaagatcgagctgctggagcaggtcgtagcattgctggcaatgggcgaaccgctgccggataagaaccgcgaccatgacctgtccggcgattgggcaggccatcgggaatgtcatattctcccggactggctgcttgtctatcgcatagaggatgatgttctggtgctgacgctggcccgcaccggcacacacagcgacttgttcggcaaataaacagtctgccgccgtatggggaaacctgtacggcggtttttctgtatgcaaaggtatgtcgtgaaacgcgacgtacttgacaggggtacgtcaaaacgcggtagcctttaccgctccggcccacggtcgtgagacttgtccctttcctgtcgggacagctgctcggcggttttgcggagccgttccactgctttcaaatcctccctcatggatttcatggcaagcgtgtccgtctgctttccggcgatcagctggtcgatttcccgctgccatgccttcggggtgattgcctcaccgctgtctttcaattctttcagataccgggctgctgcgtcatacaggatcagttcccggctgtggcgctgctcaaactgttcccgcttttccggctttactttggcaagctgtttgtggatgggcttgtactggttgtactgttcccacatctccccgcgttcggtaagaatggcgatccggcgctcagccttgacgatctttccccgcaggtcatagtaacggctgttcatatcagcgattttttcatggagctgctgcatagactggatgccgtttgcctgcaaaaagctgaatagtgcagcgctttcctgcaaggcccggattttgccggtgcgggtgcggggagcgttcaactgctgctgggcttcccacaaggcggtcaagctgctttgctgcgtttgtggtttttccgcttcggcttttgaccagcgataaagacgggtaatgcgggctttaatttctttcagcagtttgttgtcggcggcgatctgccggtttacctctcccttgtcggtgcggataccgcgcttttccatttggctggcagctggccccagatggacagaggggattttatcaatgccctgccgcttgtagctgcggtggtcaatgcgctccggtctaccggcagattccagcgcccggttggtgtaggctgcccacgctgcccgccaaatctccacatttcctttatcgttccagtcggtcgtatcctcccgatgatttttccagccgcctttcccatccgggatgcgctgtccgttctcgtccagatcgtatgccttgcggcactttgcaccccactgcccgttttctttcaaaggccggagcgtcagcatgatatggacatgagggttgccggttcccttgtcatggatagcaaaatcggcgcacattcctttgtctacaaagttgtccttcacataggcacgcacaagggcaagctgttgttcgccggacagttcacggggcagagctgcttcgatctcgcgggcaagctggctgtcccttgctttctcgatttgctccacgctgttccagaggatagatcggtctgcaaattccggcggcgcgttggcaggcagcatgatctccgcatggacaatgccgcctttccgggtgtagtcgtgggtcattccatcccattcatttgtcagcttggttccgctgcggtaagcagctgcggcaacagcagaacggcctgcgctgcgcttgataatactgacggggatatgacagaaatctatggggaacacctcctttcagtgaggggataacaggctctgtggagccgggcatacgcaaagcgggtgtctggctgcgcagagcgcacaaggggtttggggagcgtagcttcccatcgcggacgaagtacgcaacgcccccggcagggcgcacagcaccggcaacggtgtataagtgcgcccttgtaaacaagggacttatggcgtgtccccggattttggcaggtttgcagtcaattccgcagctcccggaagatgggacagggcaatcagaaatgttttgacctccgcgccggaaaggtcgggagccagcgggaaaatcccctccaaaatggctccgcgctcaatcaggcggcgggtgcgaaccctgcgttcttcgttccgctgcttgttctccaaaatcttctttcggttttcaagctgccgaatctccttcaggactttctcccgttcttctttttgggggtgggctgtaattttttcgttcatgtcaggcacctcttttctttggaaatactcatagattgaccgtccatttctgtcgagcaaagtaccggcgcagcctccgcagtgcggcatggatggattttcccgcctgtgatggcgtgataccctccattgcggcaatatctttcactttcatacccagcatatagcgggcgtggacacggcgagcctgcataggcggcagggaagaaatggcttcgtacaatcgccgtatcaattcttcgtattcggctaattcttctttttctatcaggtagtcctccggcgatggctgcgcccagccgatggcggcattttcgattccatcgttacaatcgagggaataaaacgccttataccggaacatcttgcgatctctggcggcctcggctctcttgtccagaagaaacgcttcgacgatctcatcggacacctccacaaaaatgtcctctttgcaaaatggataatattgtttgagattgatggtctgcataggcacgccctcactctgtttgaaaaaggtcatcatagcagcggcgcatattccgcagcccccggcggatggcaacgctgaccttactgctatggataccctctctccgggcgatttccggctgcttgataccggcgatgtagtaggcgtgaacacggcgggcctgtgtcggagtggcatgagccagagccaccggcagagctgcaatcaggtataggcgggtgatcatttcttctcgttccagcaaaatatcttccggcgatctgctgtgttccagtgcgtaattttccagccagcggtatgcgtccagagagtagcaggcgcggtggtagactttccgacgctcatagttctccatctcccgctgggcctgatacatcgccgcccatacctcgtccgtaacatccacaaactcgtcatgccggtagtggggatacatccaccgcagattgattgttttcataggcttacctcctgaaaatcggatgggcgggcagcttgtccgctgtccgcccatcgctgagataagggaaataatccctttcacttggtagccagaaaacaggtcattcgttaagcctgttctcaaagaaatttataaatttttttctgaccgcctccacactttgataaacagccactttggagcaaccgcacagcacaccgatctctgcaaggctcagcccgtcaagcgcatagagcaggaaccggcggcgctgggcctcggtacaggtgtccagaacagccatcagctcatgcagcgtttccatgcggcaaaggtattcctccggcgtttcactgtaaacgcccacgccctcggtaaaagctatgtactcgtcaaactcccggccatcccaatgcctccgctgttcatgaaacaggttctccgttttgtgatcggcccggtcaagaaattcatagacttccagcgtaacctccacggccacagcttgtccgttataattgatggtaacttccatctgcctttcctccattcagatttttttggtaaatctgaatggggcggcggggagcggcaccggggataaagttcgggccatgctgacccgatgttccggctccataaggacaaaaaagcgcccggacggcataaagccatacgagcgtaatagagtatattttgttgttcagttacatggtatagtgcatactgctgaccgcattgctccgctgctgggaacaggctttttttagctggtgcagatcacgggcactgtgaaaaaaggcaaaaatagacacggcggcaatcctcctatgtgccgccgtggatttacacggtgttaggtcgtcgttggtttaggataaacgaaaagaaacggcggctctgcaaatcaaagccgccgcttcataggcgcgtggaaatgtgtctgctgtacgacggctttttttcttttgccgtcgtccggcagaatgttactccatattcaattcaatgcttccagtgaaattttcacattcaatgccgatatagtttccaccttcagggagtgtaattgtatcactatatgttccggttgtttcaagcaaagtgacttcttcatcagctccagaaatccaaaatacttttgcagttccatccgtaacctccagcgcgcagtcaatagacagatccttacccgcttcacgctttatggaagttccgccgaacaaatactctgtatctgaaaaatcctcatagttggctgtatagcttcctgtataatcatcaattcctttttctttcgtaccttgtaaggatgaatttccggtaagtgctatggaaccagcagactgaacaatattgttatactgatcgagaacttcatcttttgtacaaccggaaagcacagaagcgcccaacagtatcaagcataatgatagaactattttcttcacaggtatcaccttcctttcctgcgtacagcacgctttccttttcccttggaatttgcctgtttacgggattttatttcttttttgttactggacatcagtaacaacagcaccgcccagagaaccatgatgccaaccccaatgactgccagcaaaggattcggggctgtggttgttccggcatatccactcatgtcaaagcccactaaaatcagcgcagcagaaaacggatagatgctggcaaggataccgcctttgaagaacagcatgctatatccaaggaaaaacgccagaatggaacctcccagatatgcccctcggatctgcccaaaaatcaagatcagcggcatacagaccaaataggtcgtcagagctgccaacacgatctgtgtacctccatgaaaaaacacttccactgtcagtcccgataatccaaccgtcaatccagtaatcaaggtaacgccaacgctgtatattcccagcaggactgcaaaaatcccgacccaaaagagcttagctcccagcattttcggcatggaaacaggaattgtcatgatgtttttcagcgtatcatgggtggattctctgtcaatcagccagctgccaatcatcaccagtgaaatcggaaaaaacatctgcgtattgccccagacaacattctcaaacagagtggaaaaatcatagtttggatttcggtactccgcctccacaatcagctggctcccatattgcaccaacggacagagtgcaagcgccaccagccccacccaaagtatttggcaccggcgtagcttgagcaattctgcttttaataaatcccacataattacacccccttagatttcctggcgccggtaaaccaacgcaatcagcgcaagaaatacaacggcttccacaacaatcacaccgaacacctgaacaccattcagaaaatacggactgatccgttccaacaagtctgccaattccgcactggtctggctttggtcataaaattggaaggtccagcggaaagccagcggtcccggaaacagggttccgatattcaaaccaaaaggctgtgtgaggaacgcatcgctcatcgaaaggatataatttgcagtcgtatagaaaaaggtaatcacgaccgacacgatatagtttttattaagaagaacaacgagcaggatacatggaagtgcgcctacccacataatcagcccttcttctatcccaacgccaaacaagatccaaaacccaaccggctcccagccctgaaacagcaaaaccgcaagatttaccaatcctccaactgccataaagccaacggcaaacaatagcaaaaccagcatcttggacagcaccaacttggttctgtttatcggtatggtaacaaggttttttagtgtgtcattgtccagctcctcaaacagcagattggaagccagtatcacaaggagcggcatcaaaagcaaataagcactgagctggaacaggctggacatcactccatttacagcatccacatcagtgtttacatctgccagaaagaaggcataagccaatggcatgaaaacagaaagcagcagagaaataaataccaagggcttccgttttaatttcaaaaattcgcatttgattagtttaagcaattccttcgccccctgtcacacgcttgaagtaatcttcaagactttcttcacaagtatgcgcctccgatacctccaatccgttttctacaaaggcagttacaattttccccacaggcagatcaaggttgtgcaggcgcagattgtggtcgtcctgtatggaaaaatggttttcatggaaattgcgttccaaaattcttgccgcctgtgcagtatcagagagtgtaaaccggatatgcttactgcttttttgctccagttcagcaaggctttcttcttccagcaatgcgccgtgatcgataattccaatatcgtcagccagcagggaaatctccgaaagaatgtgactggaaatcaaaatggtttttcctcttgcgtcgcaaagctcccgaataaaggatcgtacttctgcaataccgataggatcgagaccgttgatcggttcatccaaaatcaaaagttccggatcgtgcataacagcaagggcgatggcaagccgctgcttcataccaagagaatactgggaaaagagctttttatctttgtagggcagtcctaccaaatccagagcgtctttgatggcatgattgtttggtacgccccgcagagtagcaaagatacgcaggttctctgtgccggtcagattgggataaaaaccgggggactcaatcaggctgccaatacggggcaacaatttcttttcattcccctgcaagggctttccccagattttgacctccccggaagtcggcttcgttaagcccaacagcattttcatagtagtggtttttccggctccgtttctgccaagcagaccataaattctcccacgcttcacatggatatttaagtcagccacactcttttgtgagccgtattgcttcgtcagattttttgtttcaatgatataatttgtatccatattcaaaacctcctgttctgtaaggtattctatcatgccaaccttgcattaaccttgccgcaaccttgcattaaccttgcaatttgaaatccagtaaaatgacaaaggctcccgccataaagacgggaacccgcttaactctccaaaggaaaaagcaacataaattcagttccttttcccggcaaactttcaactgctatacttccacccatcttttctacaagctgatggacaatagaaagaccaagaccgcttcctttttcagaccgtcctttgtcacacttatagagccgttcaaaaatgtgtttcaaatcttccttctcaattcccactccattatccgccagcagcagctccatgttattttccttctttgacagggcaattttgattttgtctgcatggctgtgagcgattacattttgaatgagattattgacaatcctcatatagctgtccatatccaatcttacccggacaggctgttcgggaatatcgatgtcataatcaacctgtttatcctcaaaaatcggtatccagtcgatcagaatatttcttgtcagctctgcggcctcaacgctctggatttccaaagcaaactcgttggaatttaacttgaaccagtcaaaaagtacatcaatgtattctttcagatcatgggctttccgacgggcggtttcaatataatcatcccggtcttttcctgtgaccagtcctttgtgtgcagcgtcaagatacccaatcagagtagtaaggggcgttcgcacatcatgtgaaaggctcgtcataagctggcggttggtttcttctgtctgccgtacaatcgaaagtctgccttcataggacacaacgatctcattgatttcataggcaagaggtgctgtcagttcatttgttgcagacagaatacgccggttgccatttccgtttttcacatcaaccagcacatcggtcatttctgctatttgtttttttacgcgccgaacgagagcgatggaggtcagcacagccaaaacagcaatcacaatggacaagaaaacgatgatttccatgctggctacacctccttattaaaccggtagccaatccctttgaccgtttgtatatattttgggcttgaaggattgacttctaattttttacgaagccgactgataatcgccataatgttactgtcgtcatagaaatattcttcgccccaaacttcctcataaatctgctgttttgtcaaaatttttccttgatgctttgcacagtacaggagcagatcaaattcctttggtggaagttcaaaagtgccattttccgtcgtaacagaacgattttcaaggtcaatttgcaatccgtcaaaatccagtttttgcacagctccggcttgatgattaaaacgggtgtagcggcgaatgagggacgcaatacgggcaatcagttcgtccatatcaaacggttttgtcagataatcgtccgccccggcccgtaagccccgcactttagaaatgctgtcatttttggatgtaaacatcaaaatcggcaggctgttctctttgcggatttcttccagcgtttcaaagccatccataccgggcatcatcacatccagcactacaagctgatactcctgctcttttaatttctgcaagccctcttttccggtattacaaaaatcagcttctatgttttctgcttgtacgctgcgtttaatcaaagcgcacagttctctgtcatcatctataatcaaaattttattcatggcgcagctccttcccttgtcttgtccgcccatcaatcggcttctccgcagttttagggatcagccaaataccagccattttcacagcgccggggatacgctctccggcacaataataatttaccctacgaggtgtcacgccccatttctcggcagcctctttcaatgtcatatagtccatttcgcacctccacagagtacattatagttctctttctcgaacaatgcaagaaacgaaatatgaattataaacttcagccaacctgcatatagtaacattccacgggcaaagtatgaattatacaatgtaactgggtgatattatatggcgaaagttgaagactgtcccggttttgaaaccttcggcgcagatgtcaaagccgcacgagaggcaaagcgtctggcacgaaaaacattggcagaaatggttgggattgaatggcggtatcttgccaacattgagaatcaaggtgcgattccgagcctgcctgtgatgatccagttgattaaggtctgcggacttcccgtggaacggtattttaacccggagatcatgcgagaagaaagcgaacagcggcaacgggtcagccacaagctgaagctctgtcctgaagaatacctgccgattatcgaaggtgccatagacggggcgctcaaaatggaacagactgcgaagcagaaggaggacgcataatcgcggcctccttctggcatttctatatcaaggttcccggcactttttcaaaagttcccgacacctctgctggatttctccggtttctgtcacagtcagttcacgctcgtttccggtaattttatcttccagaaagttggcgtatgtacccagcaaagcgttccgtaaatcctctggggttttctgtatctcggcgctataccagtcattccggtggggttcccatgccatcaatgtataaccgtggctggtctgaaccacctcatacagagggtcatcatccagatatgcctgaaacactttcaaaaccttttcaaaggtcagcatttcccacacctcccattcagctgcaaatcagttccctgattaaaatttcctcaatctgtgccgttaatgtgttcatcagccccacccaacgcataggatcacaggctttcagttcctcagtgacacccgcagcctccatcatgtgaggtaacatggtgtccatacgctcctgcgctatccggtcaatctctaacaggtgtggatacagctcctcgctcatcagcagttggttgtagagaatgggacgatgttccttcaggtaggattttcgcatcctgccgtacttgccgatagaagtttccggctgttcagaaagttttaggttgggtatatcataatctccacaacgaatgtaagtcaacttactcatattcattctcctttgctccgtgatgattagactgctgcgctggctgctatgctgcctttgcgcggttcttctttcggtagctgtccgacagtagaaaaaacaccttttttcatatcctcagcccggatcagggctttcttagcgtccatttccgcttttttcttcgccttgattttgtcctcataccgtttctgtgcgccgctggctttccgcttcaaatagttctgatggagcctgtccttgcgttcttcttttttccgcaattcttcctgttcctctggagttaaaggaaccggctgtaaggatggcgggatatagcgtcctaaaaaattgaagtaaatttcaatttcctgcgtggtatcctgactgccttttcgggagcgttcatggacaaggattttctctacaaactcgttgagcatggtatttgtcagcgtgtcaaaattctcgtacttatcaattagggctataaatttctctgcggatttctggctctgctcatagccggtaacagccttttccagctctgcaatttcaatctcaagtgcatcctgctctttggcatactgtgcatcaagcgccttatatcttgcatccggcagcttgccgagggcgttgtcctcatagattttgcaaatcagtttttccagttctccggctctcttttgggcagcagccagacgcctgcgctttttcgatgtatcggcactctgttgagcaacctgcgtctcctgaacagtgtgaataaattccgtccggtcatttttggaatattcagcgatagccctaagcgtgtcggaaaccaatgtcagaacagcgccctcattgatacggtgttgagtggggcatagtgtcccacacggaattttggtataattggaacaggtatattgagaaatccgcctgccattgttggtgcggtggacatacatcttgccgccacaatctgcacaatagagcaagcctgtgaggggagccacttcgccccagccgtttggataacgccgtacattgctgcggattttctgcaccaaatcaaaggtctgctggtcgataatggcttcatgggtattctcaaagatcgtccattcgtcctcagaaacatagtggcttttcttgtccttaaagtgcttgcgggtcttgaaattgatggtgtgccctaaatactctcgctttttcaaaatgttcacgatggtagatgatccccatccataggggtctttgaccggctttgaacggttcacaccctcgttgaagcgggcaaggtgtacgacaggaatttcaatccggtctgcggatagtttgcaagcaatctgataaggcccatatccctccagcgtgagggaaaagatacggcgtaccacttcggcggcttcttcatctaccagccaatgctcccgcttttcgtcccataagtagccgtaaatcacggtgcctgtcaggtgcttaccactcatgccttttgacttaaacacagagcggattttccggctggtatcacgggcgtaaaattcattcatgatgttgcggaacggggtaaaatcgtcatcacctttcagactgtctacaccgtcgttgatggcaatcagacgaacaccacgctgccgcaaaacctccataacctgaccgaccttcagatagtcgcgtcctaaccggctcatgtccttgatgacgattgcctctacacgccctgcctccacttcctccatcatcgccaaaaatccagggcggtcaaaacgggtgcctgagataccgtcatcggtaaagtgcgtagggtttggcagtccattccggcgggcaaaatcctctaacatctgcttttgattggatatggaattgctctcgccctgtaactcatcgtcccggctcaggcgctcgtacagtggggtgattttttcgtttctcatggctgtacctcctgaaacaaaaatgctctaagtgattgcttcactaaccatgacaaaatcatgattaagaagtcacttagagcatatatcacccgccgccagcttgaacttggcatattggcggacagcaaagtggttcggttttttctttttcagagcttcaaacatctgatccactggattctgaaaggtttcatcatcctcgcgcacttccatcgcgttcagaaattcaatcagcgttgcaaagttctgctcttccagcggtgcctcataatggatataaccaatcaaagcacaatacagcaaggtctctgccttcgtccagaattcgtcaccggccttgccgtcccctttagtgttggcaatgagggttgtggtcagcttcaaaatatccttttcgctgtgaatatacgcgaagggattataatgcatcgactttctgaaattgatagtattgaaaatccggatactgtatccgttcttcaaaagggcttggccgcagtcgattacgatatcacctttcgggtcagtgaccacgtaggaactgtgacattgtaaaaggttgggtttaagccaaaatctcgtcttaccgctgccggaaccgccgaccacaagcacatttttgtttctggcatttgccggattcttcgggcgattgcccatcatcagacgctccgtccgggtcagaatcacattgtttgcaaacactggatcttcaaacggttcgatgtctttctgcgtaccccaccgggcagagccatactccataccatgacgatatttcttggcatttttgcctttcagatacacagcaagccgcagacccgctccgcagcacacaccaatcagcaaatccagcggatgcagacttggcatcgggttggaaaatgctgcacccagggcagaaagaaagccgaggagcttttcagacatgtctgcgccctcggcaattctccacgcttctcccagattggtacatacaagaccggcaatgaagtacggcaggttcaggatcagcagcttcttggtcttattactcatagatcacgctcctgacttttgtgacgaaccttatccggcagaattgcagccaccagttctttgagcttgttaagctgctccagaacactcggtttttcctttgctttcagcttgcggttggtgaattcctcaaaagcggaagtcagtgcatccgcatccttcgccttaaagaacaccgtgtacttgggtggaatcacattttggtctttcgtaatggcataatccacaccgtatttccgcgccacctgttcaaagcctttcaaatccgttttctcaatggggatactgctgactccctgattctgaccgatcagttctttgatgctctgctttccaagcggcatctgcgctgatttctgagccgcctttgcctgatggtgccgtttccacgcattatagccattcacgatagtgcgaaatgtcagtttcgtggtactgattgccagattgacggtacgattttcaacttcttcctgcatgaatctccgcctccttccttacaaactgtcccggtccggtgccggtttactcttttcttggggctttgcagccttttcctccatcttcttcaccatgtcatccggaaccggaatcgccatgatgctgcgccccatacgaacgaacatctggggctgatggaactgctcctcaaatttctgcatctgctccgaagtcagagaaccaaagtcatcctctgtcagccctaccaccagaaaatcaccggcataaatgtcctgcatatccccgtcttcggtgtaaatcgcacggttcagcggcagaccattgattttgccggattcattcagaataatggccacttcatcctcaaatggataggtgacttcaatatcgccgccgaccatggcctgcaaatcttccagctccgtgccaacactgattttcttcggataggcattgggctgtaccagcagcacatccattgtcctggtctctgccaattcatgttctcccacggtcttgaaatccacaccggtgaaatcgccggaatccagaacatagtcctgattgttccacgcctgcgtcaccatgcgttccgcatcttcctgtgaggcagcttccacggaaacctttctctggagagtctctgtaatctccacatcaaatttcttcataggcacctccttagatcaggcgcagtgccggaaccaactcgccgccaatggaaaccaccgtcaggttctcgttcacatagtcgatggtgcgttccagcgtaaacagattgatgctgcattcgttgccgttctggtcgatttccgaaacctccgcagctcccaacagatagcgggttctgtcagtctcgatcacatcgctcttatcataatggagaagcagttccccatctgccaccagatcagcctccatctcatcgtaaacatcctcaaagatgtctcgactgccatcctcggtcaggagttcgccgccagcccccggcaggatcaccatcacaatgcgctccttcgggtgatcttcacggattgcctccagcatcagccagttatgaagcatcgcaatggacttctcaaacatgggatcatccatcggattgggctgcgatgcaccgtgcgggcagttcttgcaatccatgctgcacactgcgttgttctgattcttcttaaagttcatcatcataaaaatctccttctcatcgttccatatctcgttgtttacttcgctgccatttttccagcagccggataatcgtgtcctgcatctgcttcggcgtataggatttcgggaaatacttccgaagaacctcgtttttaatcgtcacatggtcaagctcatcctttttgatttcattcatcacttcacacatggcatccaacgtgcagccgccctcctgtgagagcttcttcagccgctgtgcctgcgacagggatggagatgcctgtgcatagtccattgcctccagaaattccttctgttcagacggtttcaggtaagacaactccaccgccggattaaaggcgattttcttctcatccaccatatccaaaatttcaggaatcaggttggtaaggcggatatagcgtttaaccgtatccttactcattccaacagcttcaccaataatctccgtagacaacttcggtgcaaattgctccgaagtcaaatcttttctctgaccctgatgtttcatcgcctccaacttcatcttgtaggaaaacgctctctcgctgggaagaatattctcccgctgcaagttgctgtccaccataaagatgattgctgcatcatcgtccatttccttgacgatgaccggcacagtctccaaacctgccagctgcgccgcatgaagtctgcggtgtcctgaaagaatttcaaatccgccttccgggtcaggtcggacaatcagtggtgataccacaccgatctgcttgatgctctctacggtctgttccatcagctcgtcatccagcaccttaaagggatgcccttcaaaaggatgcaggtcagaaagcggcatctccgtccgcttctccttagccgcagcgtcggcagctgagccactgcggttttctgttgtaatactggtttttgcttttgccattcagcttcttaacctccttccagcggtgatagatgtcattcttacctgcgaaaaacgccttttttgccttgcacttcatagatcaagtacctccttaacgacctgctgtttttcttttccaatgctctttctgcggtcctctccgctgattcgcaccggcgtacacatttccagaatcctgctgtaaatccgggcgtatgccacatcctgcggattgcggatttctgcaattttcagattggttgtgataatgaccggaagcccggacttataccgctcatcaatgacagcgtagacctgctccagcgcatattcggtgctgcgctcaattcccagatcatccagaatcagcaaagaatagttggaaaacgaagcgatataccggtatcgttcttccgaatacatggcacccatctggttcaggattttggagaagttcgtcatcaaaaccggaatgccctgatccagcagcgcatttgctatacatgccgccacaaaggactttccggttccgacatctccccatagcaaaaggccaaggttttcagccttgacctttttccactgctccacataacgttttgccatctggatgtccttgttgtcttctgcaacgccaaaattccattccagaagatgcttttcctgaatcccagttgctttcagctgcctgattttacgctgccgctccaccagttcatcctggcgtttcttttccgccatcgcttcctgctggcatctgcaaaggcagggaacaatcttgtctctgccccagagctttaccctgcactgcaccggagtatgacagttccggcaatacagcagtccgtccacgccctggtattcctgctctccgggttctttcggcgtaaagagcgaatccaacgccgcattcaatacttcaggcaccatgtcgctcataggctgtctccttcctcaaatgtgtagtctgccgggttatacttcggcttttctctctttgcccagctccggattgtggcaaggtgatttttgtagctcctgccggtggaagccatatactcagagagccgttccacccgcatctgataatctcctgggaactcctgccggagcttgccgtattccgtgtcagagagaaggacattttcgtatgagccataccggtgctggatttccttcttctctcttttattgattgtttcagtacttgttctattagtacttaattgcgcgggattttccgtaaccggtgtgtccgtatccggatttaccgtatacggcttttccgtacacggtgattccgaacacggctttttccttggcatctcatagatcacatactccgctctgcccatccgaccgttactctcacgctgctggttcctttccagatatccaagacgttccagttctttcagagctgtaagcaccccatctacgccatccggtgtaatcgaagataatccccgtaccgaatagttccatgtgtccggtaaactaagcagcatagagagaagtccttttcctttcaggctgagaccctgatcccgcaggtggtaattgcacatcgttgtgtaattgctgtttttctcaaccctgaataccggcatggtgctcaccatcctttttcgcaggctccgtttttttcttcggacatttgcgcgaacgatcttcgctgtcctcccgtcgatggtatttgccggtatcctgcatcatgcgttcaaacgcctgaaggcgtccctctgtaaaaagcgtcattcgatcacaccccatttcttaaacaacttgaagagatgattctttcccttgcaggtcactctcgtctgctgcaccagttttccgcttctgccgtagcaatcccggacaataaaatagccccttgcagatttgtctgcaaaaggcatcagccagccgcttggactgcggtacagatagcggtgatccagtaagagagctactgccgtcttctctgggattccgatttccttacagaaattccggatgcaggtgcaatcttccgaatttacaaaggtgtcgaagtagtctgccttgggctgtgccgcatccagctgtttgcggataccctcaagctgctctctctcggctacaagctcctgtgccagtgtgtagatgacctccggatgctgaatcacctgatccaaaatggaatcgctcatatacacaccatgcttgcgaatggacgggagaacttcatcaaacacccagtgttcaaatcgttctgccgatggcagcttgctgtgaacgatcagccggtaaacatcgccttctgtgataaaggagatttcaacgacctgctctccagcatctccatactgattcaccttctgaacgaccccctcgcgtttcgttagggggcctctgcaatggcgtttcactgcggcgtagggattcacataccccaacgctttcgccacatcgcttgcacagaagaaggtcttgcccgcctcttgcaacacgcggatcgaaccaaactcctggttctcaaacacctccatcatctgccttgactgtccgccatgactgcccacatcggtgtcatgggtcttctgattgaaatccgtcatacctgttacctcctgctcaaatttgtctcgccggatttcgggcgaaaaaaatagagcctcgacccattctcgttttcaaagaatgagccaaggctctatgtaacaggatacctgatattaaatttttgcagaattcgtcagaactcgccaaacgaacctgacactgtttttcattccgtttcagccggatttttgccgaaaatctgtcaaggatatggggctaatttcccctccaaaatggccttctgtaaacccattttcccacccattaggctcaaaaataggccgtaaacccatggtaaacccatcaaaatgggttaatttgaagtcaaatttcctcaaatttcaccatcggaatcaggcgatttcaggcatagaaaaagcccggaaaatggcgtatttccgggcttttttagcattattaagctgtagattatcgcttgctgaactgcggagcgcgacgagcggctttgaggccgtatttcttacgctctttcatacgcggatctcttgttaagaatccagcggactttaagatcggtctgtaatcagcatctacgttcagtaatgcacgggcgataccatgacggatagctcctgcctgacctgtgtaaccaccaccgcgaacgtttactaatacgtcaaacttatcagctgtctctgtagctgcaagcggctgacgaacgataaccttcagtgtatctaatccgaagtattcgtccatatctcttttattgattgtaaccttacctgtacccggtactaagtatactctggcaacagatgattttcttcttcctgttccgtaatattttgcgttagccaatgtcttttacctcctcattaaaatgttaaagcttctggcttctgagctgcgtgcttgtgatccggacctgcgtatacgaataactttgtatacatctctcttccaagaggtcccttcggaagcattcccttaacagcatgctcgatcactctctccgggtgcttagccatcatctcttttaatgtggtctctttcataccgccaacataatcagagtgattgtagtaaaccttctgatctaacttcttaccggtaacctttaccttctcagcgttcactacgattacgtaatcacctgtatcgatatgtggtgtaaagattggtttattctttcctcttaataccttggcaacttcagatgccaggcgtcctaatgtcataccttcagcgtcaactacataccattttctatcaatggtagctgggctagccataaaagtcttcatcgttattcctcctagaaaaatgctgttcatctcaggcagcgtgaatgtccggcacactgtcctccatgtcatattgtttatagttaaatggcactccggggctttggaatgacatttattcactatcacagacttacatattatattacacgactccttgcgtgtcaatatctttttcttccatatattcaattcccatcatggtcagtccgtgcgccggtgcggtcggtcccgcagcctccctgtcgcgcgccgcgaggatctgctctatctgctccggctcgatctgacctccgccgacctgtatcagcgtcccggcaataatgcggaccatattgtacaaaaaaccgttgccggtcacccggattgtgatgatgtcgtccgcttttgtgacgctgcacgcatagattgtccggaccgtggtcttcacctgcgcgttgaccgcacagaagctcttgaagtcgtgctctccttccaggtacgccgccgcccggctcatcttctccacatccaggctgtggtggtaaaaataagtatccagccttctcgtcggcatgcggaatgtccggttcaaaatgcggtactcatatgtcttgcggctgttctgatagcgcggatgccagtccgcaggaacctcgcaggaaccctgcacgacaatatcctcaggcagacgctgattcagtgcaaacgaaatcttatccgccggcatgcgcgtcgtcgtatcgaaaattgccacgtttcccagcgaatggacgccggaatccgtgcggcttgcgccggtcactgcgatctcctcccccaaaagcgaggaaagatggcggttcagcacttcctcgatcgtgattccgttgggctgcacctgccatcctttataattcgtgccgtcgtacgccacggtcatttttacacgttttacctctttctccaaaccatttctccttgcagctttattgcggccatggcacaaagattctgcacagaatgatgagcgccagatacagccacatgatcagataggacaggcggtcgcgtccctcatagcgcagcggcttcatcttcgttctgccctctccgccgttatagcagcgcgcctccatcgccattgcaagatcatccgcgcgccggaatgccgacacgaacagcggcaccagaagcgggatcatgcttttgactttttttaacagattgccactctcaaaatcggctccgcgtgccatctgcgctttcatgatcttatccgtctcctcaatcagaatcggaataaagcggagcgcaatcgacatcatcattgcaatcgcgtgcaccggaacaccgatcttagaaagcggcatcagcgctttttccagaccatctgtcagctggttcggcgttgtggtcagcgtcatgattgaggttccgagaatcagataggtcaggcggatcgccatcagcaccgcgctggtcacgccttccttcgtgatcgtaaaacgccagacgcttaccagtgcctcaccgggcgtcaaaaacagattgaacaccgccgtgattaacatcagaatcatgattgcctttaatccctttaccatgaacttaaacggcaccttcgacagctttatgactgtaatcagaaataccgttgcaatcgcaagcgctgccacgccacggaagcagaacagggatatgatatagatcattgtactaaacagtttcacacgcgggtccagtttatggatcacagaatctgccggataatactggcccagtgtaatatctctcaacatgtataaacttcctccctaccggaattcttcatcggcgcccgccggtgactctttcctccgtaaaatgattcctgccgcggcacaccttaccggtgaatatcgctcctgccggaatcaattcccgtcaatgcctgcatcaggctggctctggcttcctccaccgtcgtcgcctccgtatccacggaaagcccgtgctccttcagttcgtgcatcaggtaagtcacctgtggagccgcgagtccgatcgtctccagctccttatagtgccggaacacttccttcggtgtgtcgtcgaacatcacctgtccatggttcatcacgataatgcgctccacatacttggcgacatcctccatactgtgcgacaccagaatgaccgtcatgttccgctcgcggtgcatccgtgccacaaggtctaagatctcgtctcttcctgccgggtcaagtcccgcggtcggctcatccaggatcagcacctccggcttcatggcaagcactccggcgatcgccacacggcgcttctgccctcccgagagatcaaacggcgactggtaataaagctcctccggcataccaacactgcgcagtgcctcaaacgcccgcagtcccgcctcttccttggaaagtccctggttcttcggaccaaagcagacgtcatcaaaaattgtcgtctcgaaaagctgatgctccggatactggaacaccagtcccacccggttgcgcagttctctcaggtcaaaatcttcctcataaatatcctgtccatgaaaatagatcgttcccgaggttgccttcatcagaccgttcaggtgctgaatcagcgttgacttgccggaaccggtatgtccgatgatgccgatgaactgtccgtccttaatctcaaggttcacatcctttaacgcctgaatctggtacgcggtctcctcactatatacaaaattcactttatctaaaataattgacatttctactctccgatctgtgccacacgaagaatcgcgtccacaagttcctggcggtgcagcacaccgacgggtacatcaatgccggactggcgcagcagatctgctaaaatcgtcacctgcggcacatccagtctgtactccttgagttttcccacctgggaaaacacttcccgcggcgttccctgcatgacgacttttccctgatccatcacgatcaccttgtcggcgtccacgacttcctccatataatgtgtgatcaaaatgatcgtcacgccttttttccggttcagttcatgcgccgtgcggatgacttccttccgcccgttcggatcaagcatggcagtcggctcgtcgagcacaatgcacttcggttccatcgccatgaccccggcgatcgccacgcgctgcttctgtccgccggaaagcttgttcggcgaatgatgacggtacgagagcatccctaccgcaccaaggctttcttccacgcgcttccagatctcatccgtcggcacgccgatattttccggtccgaagccgacatcctcctccacgacgctcgcaatgatctggttgtccggattctgaaataccatacccgcagtctgacgcaccgcaaatgtattctcttcctttgtgacatccctgccatccacccagagcgagccttcgctcggcagaaggagcgcgttaatgtgttttgcaagcgtggatttgccggaaccgttgtgtcccaaaatagcaataaaatctcccgcttccacatccagatcgacgtggtcgagcgctgtggagatggactccacattgccctcctcatcgcgtctgatatattcatgaaccaactgtcttgccttgataattcccatctgtaccctctctaatcttcccagcgcagccggtgcagctcgccctgcagcttcatgtggtcaaactcattctgccgcaatgcctcatacagcacaatcgcaaccgaattggataaattgagcgaccgcgtctcgccgatcatcggaatccgcacacaggtgtccggattggcttttaagatctcctccggaatcccggcgctctcttttccaaacataatatagcagtccggctcataggatacctcggtgtatacatgtctgcccttcgtcgtcgccatataaattttagcgcccgggttcttcccgcagaaatcttcccagttgacataggtggtcacatccagttcactccagtaatccatgcccgcacgcttgattgctttctcatccagatggaatcccagcggttcgatcaggtgcagtcttgtccctgtcgccacgcatgttctgccgatatttccggtgtttgccggaatctccggctcatataatacaacattcagctttgccatgtcagtctccattcgggaggaaacgccctcctccctttttcttatgatctcttgcgaagatctgtgataaacgcctccatgcggtccatcgccttcttcagattatccagcgagtaagcataggaaatgcgcaaaaatccctctccacagtctccgaacgcagtgcccgggacaacggctaatttctgctgattgagcagctccgtcgcaaattcttctgatgtcattccgaactccttgatgcacggaaacacgtaaaatgcgccaaacggttcaaagcaggacaatcccatctccttaaacctgtgaagcagatagcggcgtctgccattatactcctcacgcatggcagccacatcctcgtctccgttgcgcagtgcctccacgcccgcatactggctggtggacggtgcacacataatcgcgaactgatgaatctttaacatctgctcgatgatgatgcgcggcccgcacgcatatcccagacgccagcctgtcatggcatgggatttggagaaaccgttgatcacgatcgtccggtcacgcattccctgcagggatgcaatcgtcacatgctgctccagatacgtcagctccgagtagatctcgtcgctgatgacataaaggtcgtgctctcttacgatctccgcgatcttctccagatcttttttctccatgatggcgccggtcgggttattcgggaacggcatcaccagaagcttggtcttcggtgtgatagcagcctccagcgcttccggcgtcagacggaattcattctccgccttcagttcaatgatcaccggaacgccccccgcgagcacggcacacggcacgtaggacacgtagctcggctgcggaattaaaacctcatctcccgggtctagcatggcgcgcatcgccgcatcgatcgcctcgctgcctccgatcgtcaccatgatctcatgatccgggtcataggacaccccgtaatgccggtccagataatggtcaatctccacttttaattccttaagtccggcattggatgtatagtgtgtctttcctttttccagggaataaataccctcgtcgcggatatgccacggggtatcaaaatccggctcgccgacacccagagagatcgcgtccttcatctcatggacgacgtcaaagaactttcggataccggacggctggatcgttgtgattgtcttatttaacggatctctcatcttacatctctatcctttcatctttgggctgctctgccattacggttccatgatccttatacttcttcaggatgaagttggtcttcgtgctgagcacggaatccaacggggaaagcttatcggacacaaactgcgaaacctcgcgcagggtctttccctcgatcgtcaccataaaatcaaagcctccggagatgaggtaaacggaattgacctccggatagttgtagatccgctctgccaccttgtcaaagcccatgccgcgctgcggtgtcacacgtacctcgattagcgcagtcaccttctcaatgcccgctttgtcccagtcgatcagtgtgtggtagccgcagataatgtgctcctcttccattttctcaagctcattcataaccgttgtctcatcgacaccgagcacaatggcaagctcctttaagtcaatccggctgttcttctctataaatgtcaaaatcttttcacgcatcgcttcttctcctttatatcgccttatataattcgtccgccttcggaggctccaaaaatctacgctcctcctcgttcaaaagaacacggtcgttccccgcggttgcctttccgataatcgtggcagggattcccgccttctccagttctctcaccagcagattgccatcctctgccgccatcagcatacagccgctggaaatcagctggtaggggttgattccgaaaaattcacagacctcaatggtctcctgacggaccggtatctttttcaaatcaatttcaagtccgacgccagatgcttccgccatttcccagagcgcaccgaatattccgccctccgtgacgtcatgcattgcactaacgccagacttgacggcgactgcggcctctgattgtaccgatatataagcatccagtgcttttgccttctcgacaaaaggcaccgaaaactttgtctctaattctgtctctttttcctttgcgataatggaagttccctcaattccgatccactttgtgacaagaatatccatgcccggtctcgcccctccggtcgagatcagacaaccgtccttcacttttccgacaccgcagacggagatcaccggctgattgaccaccgccgtcacttccgtatgtccgcccatcacctgaatctttgccttggcgcaggcttcctccacctgtgccatcatggcacgcagttcgggctcctccacgctctccggcagcagcaccgtgagcagcacgcccaccggctccgcccccgcgcttgccagatcattcactgtaatctggatcgcaagtgtcccgatatccttcgccgttccggtgatcggatctgtggacatcacgagcgtctcatcctccgccagcttgatcgcagcgcagtcctctccgacgccggctcctaagacaacctcggggcgtctggtatgtatttgtttgaatacggagcgcttcagtacgctctccggcagttttccgatcttcatctgtgttctcccgtttatttacagcttaaggctgtctcttctgaggcagccttaaacaatctcttatacttttattctccgcctgtgatctggctctcatccaccgttccggtaatcgcctgctcttcctgcgacggctgttctaccggtgccggatttaagattgctgccgcactcgccgcataaggtgcaaccgccgcattgatggttgcctcatccccggtcgcaagcgccgcgccaatcaccgcagacacattcgggtctgctgatgccgttcccacgtttacaatcttcggagacgccttgtaggtactcttattaaaaatctcccggctctcctccacaccgtctaccgtgacaactttccacagtcttgccacatagccgatatgcttgccctgcgcagtcttcatataacccgccggatctccggtcgccacatactgcgtgcccggatcctgctcggataccacttcactctcataagtcacaacgcggttcgatggtctcgtgtcgtgtccgtagatcttaaaggtgacattctttccctcggtgtacccctcaatataaatcggaatgtcctgattattgacaaaacgcagatccttgtaatcgcctgcaatcgccgcatccatggatggcttcacatagcttacgatcatggaatgattcgagcgctgcgtgatctcaagctccgccagaatgactgcgttgtacaaagtcgtagatacctggcacacaccgccgccgtaggactcaaccgtctgaccattctcgtaggcacctgccagttcgtatccgtttgccgcatccagcggtccgatcgcttcatagacggaaaattcctcgcccggataaagcagtgtaccattgatcttgctggttgcattggagatgttgtcgcagcggttctgaccggaatccttgtaattcgtcgtatagcttcccatcatatccgtgatctgctccagatcttcctcgctgccgcgcggctccaccacttccgccacgagctcgatctcggcgttgccaccgtcccactcactgctgatatagttctcgatcgccgcaatggaatcctccacgttgacctcgatgccctgctcgcccttaatgatcttaaacgcaccgttctcacgaaccagaccattatccacagcctcctggttcagctgcgccgctttctcggaaaggatggatgccaccgcatcggaatccacatccagtgagagtgcaatcactttgtccccctgctgcagatccttcttgtccttgtaccgcttgatgaggttgccgcttctgccgacatctatcgcctcgtccaccacgtttaagttggaaaaggatattccaagatcagctgccgtcacggatacacttttatcgccggtcttcaatgtcatctccgccgaatctgcgctctccacgtacgcttctaccgcgctgaccgcttcttcctccgtcatgccgcccacataaatattgccgatatagacaccgtcctcaatcgtctccgtctcctgtgccctcatggaaaccggtgccgccagcaatgcgtaaagtgccactgcacccccaaacaatgtcaaaaaacctgttccctttttcatattcttccctctgaaatatctgttctctgctctgctaacgcctgttttgccaagcatatactctgcttccgctcattatagcccatacgcgcctttcttttcaaggtgcataaacacgaatatgtttgactcactctgggatttttagtatattttacatgaaagcaaaacggcggaatacacttataataacgctgcaagcaccgttgtcagaagcatggctgccacaaccacaatgatgattcctgcaagcagttttttattcttttttttaccaaaatcgtacatttcgttctaccacctttccgttcacgccctggataccgcgcgaaccttttacactataccacaagaagggatgattctcatgatttttttaggactttttatcttttttgtatgtatgtttgcttatctgcgccataaaagcaccgctgccgaagaagccgctgccgagagcttctggaaccgcgagaacgaagcaaaccacacacgccgcaaggacatcagcgggcttccctatattaccatacctcttgccgattttccaatgggtatctatgacaatcccgaattaaaaaaatatgaggagactctccaatcgcttgccggacagaaaatcttaaacctcggcggcaagaccaacaccgatctcaagctggagtacggcgttgccaatctggaaacgctctgcgcctgtgacgagaactacaccaccctctgccgcaccatctatgagtacgccgaatgtttgaaaaagctcggtcatgacgcggaggcagtccgggttctcgagtacggcatcagctgcgggtccgatcacagtgggaactaccggatgctcgcagactattatctaaacgccagggattccgacgcacttgaccgtcttctcatcgccgcgagagcactggaatcccccagacagaacgccatcgtcgccatgcttgaggaaaaagtaaatgcttaatcccggggcatccgcccgtgcacggcgatccagcggtcaagcagtctcgacgcctcactccgcgtcatctgctccgggatctccgtctccgggatgccgtaatgcgcagcatatttcttgaggccatccatctgacgccccgttgcgggcgtctgtttttttgtgcggtaacagagcgcatacggcagaaactcctccggctgtgccgtaccgtactcctgttttaatctctccagcacgattccggtcgccatcgcatcatcgagcgcacggtgcgcccgctcacgcccgattccgaaataggtacacagactttccaggtcctttttctgctccgccggaaggaagcgccttgccagctttaaggtatccacagcatttcgctcaaacgcctgaccgtggttgaccgaccactgtttcagaaagctgtaatcaaaaatcacattctggccgaccagcacatcgtcccccaggaatgtaaaaaattcccgcatcgcctcttccggctccctgccgcctgccgccatctccggcgtaatgcccgtcagttctaccacgcgctctgacaattcccgcccacattttaaaatagcgccatacgtttccgtctgtctgccgtctctgacgcgcacggctcccacttccagaatggcgtccgtcttcgcattcaatcccgtcatctcaagatcaatgaccacataatcctctaacaatctattctcccctctttccggttattccccggaaggctccagatattcatgccgcgcctggtgatcgagcggatcccttccggtatagtcaaatctcacatagaccggttcttccagcctctccgggagcgatgcggtatcctgcctgtggccggaaaaccggtagaaaaaccgctcaatgtgcgactgctttccatttttaccataccggcgcgcaatctgtttccattcattcgcatctgctgcccacgaaggtctgcttccgagattctctctttcatacaggtcatataccagaccctcaccaagcaccggaagcagtcccggcttacgctcttttgcaaattccagcaggatctccgccctgcgcatcctggaatgacccattccaaaataaccgtgctcctcataaaaagttcccatttccgcaaacatggcaaacgcactcgcatactgcgtctccagaagccggattgctgtggcgtactgtccgctgttgtaatacacctcgagcatctcttccacctgccggatgcgaaggatctccccgaacttaagccagtttgtcttaagcacctcatacggcggtctgctgcggtagatcagaccatactctgtggcatgctcatacatgtaagaaccttttagcacttttaaaaatccaagctgaagctgattgggctttaacgcgtaaatctcatcaaacgaacgcgcaaatgtctcatagccctcatagggcagacctgcgatcagatccagatgctcgtgaatattctctttttcctggatgctccttactaccgctttcaggcggtccagctgcatcgtccggtgaatctcggtgattgtggcgtcgttcgtggactgcacgccgatctccagctggatcagtcccggccgcatctgaccgatcagcgcaatctcctcatccgtcagaagatcggcagatatctcaaaatggaagttggtcacgccattatcatgttcgattaaaaacttccagatctccatggcatgttcatgcctgcagttaaaggtgcggtccacaaacttcacctgcgcgacttcctgctccaaaaaaaatgccagttcttttttcacccgctccacatcccggaaccgcagtgtcttttccaccgaggaaagacagtagctgcaccggaacggacatcctctgctcgattcataatagatgatgcggttccggaaatcttcaacggctccgtagcagaacggaatccggtttaaatccagcggctcgcgcgctccggtttttacgaggctctctccggcacggtacatgattcccttgattcccgggaaatccaccttccccgccttcgctccggcacccgcttttgcgtagttctcacacagttccagaaaagtctcttctccctcgccgaccattgccccggtcacctgcggatgcgcttttagaaacgcctccgtctcataagacacttccgggcctccgacccagatcggcacttcgggacagatcttgtggtactcgtccatcagctgttccacataatccagattccagatataacaggaaaagcaaagcacatctggctttgccttatagattccttccaatatgtagtctatcgtatggttaatcgtatattccccgatctccacctgcgccccgccggtgccataagcctccgcataggcacgcagatcgtacactgccagatttgagtgaatgtattttgcattcaccgccgtcaacaatactttcatcgtctcacctgattcttgccctctctttttgcgcagtaaagagcagcgtccgccacttcaaaaaacgcgctggcacccggataagccctgtcgtactccgccacaccgatgctcacggaaaacgaccgctccccctgcggcgttgtaaacattttctgttcaaactcctgccggatctgctccgccatctcttccgcctgtccgactcccgctcccttaaatatgatggcaaactcctcgccgccatagcgggcacagaatcccgccgcgcctttgtgtctggcgcagatgtctgccacttcttttaaaacgacatctccaaacgcatgtccgtaggtatcattgacattcttaaaattatcaatatcgatcaccgcaagcgaaaaacgctcccggttctcctcgtaccttctctggtaatactctaactcctcataaaagctttcatggttgtagagcttggtcagggaatcccgcttggaacgctcatcgttcacgatcgccgaatcattgaccagttccagcgccaccagcataccgcacaccgttcccacgaagatgctgccctcaataaacggggttgtcaccgggaaataagaactggcaggtataaaatagacacagtccagcacataggctgcaacgagcagcgccgcctgcacaagcgtcatgacccggtctttgtagagcggcgtcagcagcatcggcagcaacagaaccatcggcatcagcgtcacgctcgtatgcacccacgccatcacagccgcgtaggatgtcagcaggaatatggcgcatcccgccatcgcccgtctgctgtatacacgcttctgtctgccggtcagcaggcggtacacaaaaagaagcaacagctgcagtccgctcggtcgcacaatgaacagccatccatagcgcagtctgccgcagtccgcggtgggcttaaaaaacagaaacaaaaacaattctgtgattaacaccacgccccagatcttccagcccatcgaaaagaagctcgcgctccactccttccagctttcgccactcagccattcatagctgctgtcatgtctgatcttctccatcttttcccctcattacgaaacgtaatactttcttcctagaatattatactgtatcacaccgattctttcaacggcgagtaaacgcaccccgatcagaaaaaaccagagacagctccccaaccgtctctggttctatttgaaatactctccctctttttagcacatgatgtgtcttacaatcacatcgatgccggcaatccaaagcagaagcgctccgccgacatatgcttttgtcttgtgctgaaatcccagatgataacccgtatacacgccaagcacaacgaatgcaatcgtcatacatacgatgatgatcagcatcagcgcaacgttcgtccccaggaatccgaatgcgatccccgcaagcagcgtatagatgcttgtcaccgcagtcatcctcaggaactttttcacatcaagggtctcctcccggcgctcattgacccactcgttcttgattgccttcgcaatcagacggatgccgaggccgaaaaagatcaccgccgcaatcacaagtcctacaaaattctcatcgtgtgccagctcatttctgtaaaggagaccggacagatagttcccgagcgccagcgcgcagagctgccatacagcgatcaatgcgcagatgacggacaactgttttttatccacttttgcgaccaatgctccctggcactccatcgccgcgaaaatatcaagcgatactcccgctataatcagaacattctctatccagttcatttccgtcctcccttacatgactccttattattatactctcttcttacaatatttccagaacaaatacggatttattgagacaattttcattagtcctctttcaccgcatctgtcttgtagatgaacttaatgcttccgttcacgccgtccgcaatatccgtgtaggtctgatagtcctcaccggcatccagaaccgcctggatacgatccatcagaggctcaatatcaccgtggtaggaatttaagatcttctcaattccctcctcgttgaaggtaacgattccgtctgccagctgatgtgcaccgtccgataactgatccacaccgtcgatcactgcgtcggtaccatcacttaacgcgttgacgccatcgttgagcttctgattgttggaaaccagttctgcacttccgttcttaagctgcgccacaccggatgtcagtgccggtaccgcatctgccagactctgggtaccgttagccagtgctctcgctccggttaccagactgtatccgcccgagctctgctgctcaatacttgccgccatcgtggactttgtctgttctgccgctgacacagctgctgttccggctgcttccttcgctccaagtaccgctgcatctccggccgctgcctttgctccgagtaccgctgcatctccggctgctgccttcgctccgagtaccgctgcatctccggctgccgccttcgctccgagtaccgctgcatctccggctgctgtctttgctcccgttactgctgcctcgcctgccgttgcctgagcgacctgtttcgcagtatctgccacacccgtcgccagagaatctgccgctccgccaagctgcgttgtgattgtggtatcaagctgtgctgcaaccgtctgctgtgcctctgcatatttatccggatgattgctcggaatatctgcaatgttctcacccggatactgtgctgcaaccgatgcaagtgccgctccgttaatcagattctgcacatccgcagaagatgtcagagatcccttcagaccgtccatcttcgtggtaatctcctgcgttgcctgattcttgatggcttcatactgtccgttatcaaactttgcgcctgcctgctgtgcagcctgattcttaatcgcttccgcctgaccgtccactactgcctctgcctgtgtcttaatcgcttctgcctgcgcatctaccactgcagatgcctgactcctgatcgcttctgcctgtgcatctaccgtggaagatgcctgatttttaatcgcttctgcccgcgcatctaccgctgcggatgcccggttcttgatcgcctctgcctgtgcatccactgcggacgatgcctgtgtctgcatcgctgccttctcctgatcggtaaaggaagtctttaaggtattgtctaacagttctacgccgtccgcaatcgttgccgcactgctgttcaatgtgccgacaccgttagataatgtcggaatgctgtcggaaagctgcgtgataccgcttgcgattttccccgctccgtccgtgtatgcatgaacgccggactgcagggtgccaacgccgtccttaaagtcgcccatcttggacttcaaggtgtctacgccgtctgccagttctgcagaaccgtcggtcagctgatccatcgcgtctgtgagtgtgtcaaatacctcatccaacttcgaggtgtcattgtcactgtcggcactgatgaagttcgttgcattcataaccaccgtcatcgtggtatcaagcttgaagttctcaacctttgcctttacctccacgtaatccggaatggtgacatccccgtcgaaatcgtcgtcctttacgttcaggctttccttcagccccggaagtgcatagccaactacgacattgttgcttccgtcggagatcaccttaccgttttccacctcgatatccgagaattcatctccgaggatcatgccgctgactgccataaacggtacatagatgtcttcgtcttttccgtcaatcttcgctgtcactttctggttgttcgtgtagtcgaaccggatcgtaacctcaccggattttccggcaagctcctccggcgtcacttccttgccgtccagatagtaggtcagcttctgtgtcaccggcagctcgctctctgacgttccctggtagaaaatgtcattgccgtctgcctgccatgtcaccttattgccgctttgtgtaaaggtctcatcgccttttacattttcaatatcttttaatgtggatgcatcttcaagcgtatccttgtcatcgttgttgatcagatgatcggagacaatgattttctgctccttgccggtattatcagcgatgacatataccgtctcttcttttccgatctctttctcgcttactttgcttccgttatccagcagatcctttaagctgctctcggcatcttccgtatcttccgcctcctcagaaacttccgtctcctccacggtctccgtggcagcgctgcctgcctttgccgcattcacactgtagacggaggagcctgttgcaacaagcgtaacgaccaggactccggcaataatacggattgcatatctatttttgaattttgattttaactctggtaatttcatggtttttaccttcctttcccgttactgtaccgatacattgttttccgacacattcaccgtcgtgccctttttcttgcgaaatcccatgctcgtcgcacagatcagtttatcaaaaatcataaacatggacggcagaatgaaaataacgacaaacatactgatgattgctccgcgtgccatcagaatacacagggaactgatcatatcaatattggaatacatgccgacaccgaaggtcgctgcaaagaagctgagcgcactgacaatgatcgactggatggaactgcgaagcgccgtcacaatcgcttccttcttgtccgctccgttgtagcgaagtttcttgtactttgttgtcatgagaatcgcataatcgaccgtcgcgccgagctgaatcgtaccgatgacgatagaagcgataaacggcagcgtcgtgtgcgtatatgccggaatacccatgttgataaaaatggcgaactcaatgaccgccaccagaatgaccggcagtgataccgacttaaataccagtgcgataatcacgaaaattgcaccgatcgacacgatgctgactgtcttaaagtcctgatctgtgatctcgatcagatccttcgtacacggtgcctcaccgattaacatggcagaggaatcatattttttgatgatattgttgatctcctcacactgcgcgttcacttcatcggaagcaaccgcatattccgagccgaccaccatcatctgataatcgccgttgatcagaacgtcttttacatcatccgggataaactccctcggaatgcccggtcctaccagcgagtcaaagccaagcgccatcttcacgccgtccaccttgctgatctcatccaacattgcgctggcatcttttgcggagagactgctgtccgcaatgatcatgtgcgtcgcacccatctcaaagtcttcgtttaacttatcgttcgcggtaatactgcttaagctcttcggcagtgttcccgcaagatcgtaatacacatccgtgtgtgtgtagccgtagattgccgggcccaacaccaccagaaatacgatcaggaatacgccgtaatggcgcacgatccagtctgcaatccgtcccagatccgggatgataaccttgtgcttcgtcttctcgatcgccttgtcaaatacaagcagcagcgacggcagcaccgtaacacagcagataacgccgagaacaacaccctttgccatgacaattccaagatccataccaagtgtaaagctcatgaaacacagtgccacgaaaccagccaccgtcgtgatggagcttccgaccaccgatgtgatcgtattagaaatcgcatgcgccatcgcacgttttttatctccctgaaaacgctcctgctgctcttcgtaactgtgccagaggaaaatggaataatccatcgtcacacccagctgtaagaccgccgcgagcgcctgtgtcacataggaaatctctcccttgaaaacattggtgcccagattgtatacaatcgccattccgatactgagcaaaaagaaaatcggcgccagagccgaatccatcgtaagtgacaggacaatgactgccagtacaaccgcaatcagcacatagaccggggtctccttgttcgacagattcttgatatctgtaaccactgccgacataccgctgatatagcactgatcttttaccacaccgcgcagttcctcaatcgcatccatcgtctcgtccgcggacatcgatgtatcgtataacactgcgagcaaggtgctgtccttctcatcattattaaagaaatcatagatctcatccggcagcatctccatcggaatgctgatgtccgccagtgaatcgtaccagatcactgattttacgtgaggaacttcctccatctgctcccgcattgcagatatgtccttcgcgtccataccctccactacacaaaacgagaatgctcccgttccaaactcgtcaagcaggagatcctgccccttcatcgtctcaatctcttccggcagatatgtcaggatatcataattcactctcgtgttaaaatatccgattgccgacggtatcaataagaaaatactgagaatcagaatcggtattcgcagcttgacgaccgcttttccaaatttaatcatggtccctctctcctttccataaaagcattgtataaaaaaaagaccgaatatgaaaatattcaatcttttctccgtgtatcgggttattatacactcgacccgaaatgtataactatctatacatttatattcatttgtattctggccgcaattacagttctgtcagaatatccgtcatcgaccgcttgatcatgtaattatagatttctgcaagttccctggatgaaatcgtcattccggacttgatccaggtaatcaccacatagcacatggactgcgcataatactccgcgatacgctccggcgtcagccacacgtaccggctctttctgccttccgcctgtcctttgatgacctgtagcagcacacgctccacacagctttgtgcaatgctgccgaaggagttctgtccctccagccggcttgccctcgtgtagaactccttgtcccgctcaatgctgccaaacagaagcaccagcgcctcgttgatcatcccgttctggatcagcggttccaccggttccagcagttccttgtcgataatccactccagcagatcgtatttgtcctgaaaatgattgtaaaatgtcgggcggatcacgcccgccttatctgtaatctctttgattgtaatcttctctatcggctgctttaacgccagttccttaaagctctctgccaaaagtgtatcaatcgcactctttccctgtccagtcataactccctctcgccccaggtgctctatcgcactatgagtctcccaacagttaccgccctcgctttttcatcgtcacgcatgtttaacatctctcccgtctccacgacgcgcaccagcggacgcagcgggaaattctcaaaattccgtgccaccaccgcatgctgcccgttggacagttcgacttcgcagccgatcggatacgccgccactttccttgcgaacacagccacaatatccgggtcaagccagcggtcgcccagcgccatcacatattctaacgcctccgacggcgacagtgatttctgtgccggaaacgcggaaacctttgcgtcataacagtctgcaatccggataatgcgggcaaacagatgtatctctgcgccctttttgccaagcggatacccttcgccgttgtagcactcatgatgctccatgatcccctcatacacatccgctgaaaaacggcatgtctcgcgcagatattccgcaccgatcttcggatggctccgatagacctcctgctcctcttcgctgcggtgcgccttacctccccgcacgatgtcatgatcgataaaccgcttcccaatgtcatgcagcagcgccgccgctgcaagctggcacagctcatcatgcggaagccccagccgtgcgccgactaccacagaaaggatgcccacatgaatggaatggtaatagatataatcatcataactcttgatgtccatgatattgcacatgatgtctccattgcatatcacatcatcgaccacagactccaccgttttgcgcagcttaaactccgcttccgacggttcctgcttccgcatatccgtgtgaaacagatcatatacaattttcagtgcctgcctccggacttccgggctgacaatctgctgtatctcaatccccctggaaaactcatcgtccacgtagacacccgggaacccaaggaattccagatttgaaatttgttcttctgtcagcagaatatgccttcccagaagaagtcttcccgccccgtcataaatgtcctgccccagtgccattcccggcgtcagtctgctcgtcggtaaataacgcatttgtgcttcctttccgctaaattattattattttagcgcttttactcatcaaattcaaccgtaacaaaatatcccttcggggtctctttgacgtctaccactgtgccttcccgcgacttgatgcgctggcttaccacatagttcgccgacatcgcgtacgccttgcccagtgtatagtaataggaattgggcagcttcccctctgtaatcggaagcacatcgccgacctcaagcagtccggtgcgctccattttaaactcttctctccgcatgaaaatatccctgtttctatggcttttctatgtatttcccactattgccatgcatttttcattatagtataataattctgaattctcaagatgttttcatttaccatatacaaaggagccttatgagcgatcaaactgttctcatcgatcaattcctgtcatccgtcatcggcacgattcacccggacgaaatctttgattctattatagacacagccgtccgtctgctgtctccggacggtctgctgctcacgatccgtgacgatgtcagtccttcctaccacgtcacgcgcagttttggcgatatctcctgggaaaaagattcttttctcgattcgagcattcttttagagcagctgttaaacgccgacagctacattccgtttatgccgggcgcaggtctgccgaccgcgcttgacggcgtttccagccatacacgcagctggctgatccggcagaatatcatcggtgtctattgtctgaagtacaaccgggcactgatcggctttctcttcatcgcgctgcacaatcacatgccactgtccgcagatcaggtgtccgcactgtgcaagatcggcttttatgccacccacgcactgcgcaacgcgaatctctacatgaacgcctaccgggcctccatcacggatgatctgacggcgctctacaaccgcaagcatgcgtttgagatgattgatgagctctgcctctccggtacgccgtgctctttaatcatgctcgatatcgatgatttcaagctttacaacgaactttacggctccaaagagggcgatcatttaatccagcgctgcgccaagatcattctctctgctctggatgaggacgacatggcattccgtttcggtgtagacgaatttctcatcttaagacgcggcagtgatgccgcagccgccaaagcgtttacccagtctctcgtggaagttctgacaaaaggcagcatgcccgacatggtgtgggaaattaccatcacctgcggcatctccgtgtttccggatatttctgccgacggcagagagttgatccacaatgtcgagcaggctgtctattttggaaagcttgatgggaaaggccatctcatcgtttaccgcaaaggtcttgagaaccgctcccagaatccggatatccgcaccgcctacgagcgggtggcgccgaccatctatgcgctgaccgccgccatcgacgccaaggataattttacgttcatccattccatgaatgtctcaaaatatgcggtcatgctcgcggaagcgcttcctatgagcgacaatgatatcgaggtggtacgggtcgcaggcatgcttcacgacatcggcaagatcagcatccccgagcacattttaaagaaaaccgaggggctgacgccggaggaatacgcaatcatgaaaacgcatgtggagaattccatcaagatgatccgttaccttccgaacatggattacgtgatccctgcagttatcgcccaccacgagcgctatgacggaaagggctacccgcgcggattaaagggaacaggaattcccctgatgggacgtatccttaccatcgccgactgctttgacgccatgaccgcccggcgcccctacaagcaggaacgctcgatcgactacgcggcaggtgagctgaaaaaaaacagcggcacgcagttcgatcccgaactggtaccggtgtttctgtccctcatagaggacggaaagattgcggggtgaaaatccgcaccaggtacacgtctgcctttcagtgataagtaatattattggaagcacacatcgtgggatttcagctggaaatacagctggatattcggttcataaaatgtggcatttctaaccagccggatgtttgcatccacgatgaataaaaaatattccatcgtttatagcagcttaacaggtaataccaagatgctggctgatgcaatccacggggcattacctcaggatgaatgtgagtatttcggtgtgtccgacacagtgatcccttcttccgaactgctctatcattgacgcaagcaatgttatcgtcggagagtatatgtgtcagggcagaatgccgcagtctgtctgggaacgctacttgaaaatgaaggaagctcctgctcatccggcaaatcttgatgtattgatccagaattttgactgtgcattgtctcaccctgatgccaatgacctggaaaaactgaaagaagccgttatggatccatccttctgataagaccataaaataaggcagccccgcatagctgagtctgccttactctctttatttaacgttgatgccactggcatattgctgcagaaactgtttctttccacatggtcttccaaaataatatccctgcagataatcaaccttcatttctttcattttcagaagccattctttttcctcgatgccttctgcgcatatcctgacgttaatactatgtaccatggggatgatatttttatataattcataatccctgtcactgttcatcgccttggcagtaaaatccctatccattttcacgtaacttggattcatatcacggatacaatgaagattcgaatatcctgttccaaaatcatcgatcacaaagggaatcccgttcttgtccagaattttacgaaatttgcagaacgaaggtgtcatatccataaatccgctttctgtcatttcaacacataagcattccggctgtaatgaatatttttgaattgcatccagaatatcccgctccacattgccttgcagtatctgaacataggatacatttacattcatccggaagtcaggaatatatttctgcatttcacagcacattgctgcagcttcgttcaaaatatatcttccagcgggaatgatcaatccggtctcttccaataatgggataaactccatcggtgaaacaaactcccgcccttcttccgttatcatggaaaaacgcatcagtgcctctgctccaatgatctgttcggactgacagtccacgatcggctggtagtatacttcaaagccatcataatggttcacaatagcattacgaagtgttgctatgattcttccttttcgtaaaaagacctcatagtcatccttgtcaaaaaaatagaatccatttttacccatgctttttgcctgtttcaaggcaaattcaaactttttgcggcattcttcggttccctcacaaaatgttgctgcatctataacaccaatagaaatagaaaatatagcttcataattttcggctactatgaaattttgaagtttatctgtaatcttttctttcagtgccacagcgtcttctgcggaggaagcttccagatccacgatcacatactgatccgctaccagatggtaaattctctgcttgtctgaaaggcattccttcatacagccggctacgcttttcaggatataattaccataatcagctcctctggagctattgatcgctccaaaatcatcaattcctacatgcataaaaaatcccttggtaatgggttctttttgtgcacgcaggtaagcaaggaattccggaccgccaagcagtcctgtgacattatcggctcttctcttgttgccggtctcattcagacacccgaccagatactctgcctttccctgctgatcactgatcacgataccacggcagttaatccagaccggcataccttctttatcaagccacctgtaatgaagattatgtaccttttctcttccttcgcatatatcagcaagatgctttgcaagcatcctgcggtcttcctcatatactaccttcataacttcatttacagcatctgtcagaacactttccgacatattaaaccgattcacagctgactgtgaaatctcaaaggtattatcctgcagatcaaatatatacagataatcatccatacattccgtaacgatctcaaataagatttctgctgtctgctctccaaacactttaaatatatcattaatcacaacaagaaccttccttacgacagcttcactctattcctgccatttttctagaatagcttaaagatattcacgcggtcatgcatcttggctgctccctctgccagattaatactgatcgcagtattctcttcggaggatgcagcattgccctgtactacgccggacagctgttcaattccctgaccgatctgctccaaggactctgcctgggagttggctttctccatggtgttctctgcaagctctgcaaaggacttcatatcttcaatgatctgattgaatgattctgctgttgttcttgtaatcgtattgcccttttcgatttccactaaggtcttatcgatcaactctctcgtatttacagcggattttgcactgtctgctgccagcttgccgatctgatctgcaaccaccgcaaaacctcttccagcttctcctgctctggcagcttcaatggaagcattcagggataacaggttggtctgggatgcaatatcctcgatatctgtgataatattaccgatctccttggagatttctgtaatgtactccatttccgtgagcagctcattcattttttctttttcttcgttcgctttatttgcagaggcttttacacgtgcagatgcgctctgtgtttccttcgctgtatcttctgccagatccacgaccgcatcaatggtggcattcaattcctcgatgactcctgcctgctctgttgcaccgtccgccagggattttgatgcattttccacctcggatgaattcgatgatacctgttctgccagattgctgatctcggtcagggtactgttaaaccgtttcagaatatacagcagtgatgtcttcaattccgagaaatcgcctaggaaatctgtaatatcatcaccatttctggtcaggtcaccctgcgctattgcctttacctccacagagatctcgctgacataatctgccagaatacccatggcttctttcagattcctgatggtatcgccaaactcatcctcagactcataggtaagcatttctacattagacagttcgcccttacgcaggctggcaactgctgcctctatctgttctaccggctctgtaatggaattggtaatgatccctccgatcagtgtcgtcactacagcaatcgcaagacccgctgccacgatcacaataaatatgattacagtgcatacattagccatggtctttgcctgatctaattctacctggaacttttcacataatgtagttaatttctcagcaaaagccttatattcttcatacacctctccggtcatcagcttcgatgcttcctgctgtttaccttcacggctcaactgcagaatttcatctgaagcagccctgtatttttcccatgcagcgtttgctacatcataatcatcccgtcctttttgagctttgctgtctgcagaaattattgcatccagcttcgcaccggtatcctcaatctgactctccagcttcgtgatttcttcttcgcaggagttcatgactgctgcatctgattctaccagatgctgatactgtttgattctgtatttcgcagtcattgtctctaaatcctgcagatattccaatgacggagaccagacctccgtgatcttctctatatttaaacggatcactaatgtcgagatcagtgccaccaatactaaaaataatgtcataacaagcactgtcattcgatatacttttaattttcctgcaacctttaagttagttatacgctttttgatcttttccatgatagttttcccttcctttgtaaattattgttctttttatcacgtatatctatccatatatcgtactaagatagcatactttattggaaaaatctattactaaagtattaaattactcaaacttcgcacattaaaatgtgcctatgcaccttgaaaattcaataataactggcataaaaatagcatgaaaccaatggttttggtataattgagttgccaaaaaaacaattacaaaccggagactcatgctatgaataaaagtataacacaagcgcctcaaaatgataagcagatttctaaatctatcaaacgattttttacaaggtttcatatttcctcagccttgaaagctgccaatgcctataaaaggaaaggcactccggtaacggagatttttcaatacatgtttctgctgattttctccaacagaagtatgtatatgagtctgcttacaggaaaaaacacacctaattttgcaaaagctaccttaacttgagcagagaatgtaattctctgtcctatgatgcaatgactgcgcataccgcagttgttttcacccgatataggatgctgtcactggaaagccgggaatccaatgataaccggtcacttggggagctctttttatacttttctgacgaaatgtctgatatcacatggatacaggcttttcaaatgctgcttcaaatgttcagaacaatgctttcagataacactgaactttcagacgaaaaaatcaatgaattggcgaatgcatttatggatgcacttcctactatgatgaaaatacgactgcaggctgcataaaggctgaacactgacaactgaataactgccagatattgaattttcaatgtgcatagctaaaatttatgtgcgaagtttgagttttataattaaaaaagagaatgaaggaaaaagtaggaaacaagccaaaatagccggtttaaataagtttttgcaaatctattatgcaagagtgatggaaatatataagaatatagcatagttgcataagaaaaaagcctgaataatcaggcctatttcttatgcaaaaaaaattaaaaattgtgttgacatctcttaacaaatctaaaaagtccgcccattgtctccggtgtgccggacatgcacccgttggattgtccaaacgtggaagagacgctatcttatatctctttatagtctacatccacggcttccgcttcctgcttcatcatctttgccgcatgcacggcgcggtttgccacccacagatccgagataccgtcatagatcagggcaattccgataaactgcagtgccagctttaccatgccgaacgcattcacgatacagagcacaccgaacaccaggctgaccgctgcaatgattaacatgctccaccatttctcataaccgttgcgcttcgtttctatcgcaagcttcagatcctggattccatgtacgcagaggatcacgccgatcacaatcgggatcaggctcacaatgctctccgggcgcaggaaaatccagattccgattaacaatacaatcagtcccaatgctcccgcaaacggatgaatactgcggttcataaaataggatgcgatgttgacgcctcccataatgatcaatccaacggcaaggattttacagaatacatcgatcgtctcagccggccataccagaagcacaatgccaagtgcaatgcaaagcagcgccgagactatgatgtctgccttgatccgctttaatgtttctttcatatcacatacctctctgtcactttttctgcattatactctattcaatccacagtttcaagaaacaatgcggcggctttgtctattcccattcagcccgatctgtcccgcttgactttttttcacaattccactagactatgggcacaatgaatcatatgtcccgccgcagtgcaatccacgcggagcgttttccttcacaggacatgttttccggaaagaaacaaaggagtgaatattttatgggaaaagaagtaaagacgaatgctatgcgcattcttgataaaaataagattccgtacgaaattttaaattatgagtgtggagaatttatcgacggactgcacaccgccgaggcgaccggcgccccggtggaacagtccttcaagactctggtgatgcagggaaaaagcaggcaatactatgtgttcgccatccccattgcggacgaggtggacttaaaagccgccgccagagccgtcggcgaaaaatccgtggagatgattcacgtcaaagacatcactgccatcacgggttatgtccgcggcggctgctctcctctcggcatgaaaaagcagttcccgaccatcgtgcacgagagcgctgcggcttttgacaagatctacatcagcggcggacgcatcggcacctccatcacggtcaatccggattccctgcttaccgtggtgcgcggccagtatgccgacgtcatccggcatgagtaagttcttcttccatctcctctaagatgtggagcagatcacgtatctgccttggatttcacttctacggtcttctgtgcaatatcgatcgttcccttggcaccttcgttcgttgccgttgccattccctccatcgcatccagcacgccatcaatcgatgccagaagctcctcggatgtcgcgctgaaatcgctgatcagtgcatcgatctttccggcatcctggttataagcgtctgccgcctcatcaaacgtatcatagctcgccaccacatcatttccaacaaaggcaagcagctgctccgcatcagaagaaagctgtgccacagaagatgtaacttcctccgtcaccttctgtatctgggcaacctgaaaagatctgctcagtgaaaacgccatatacagacagaccgccatgacaatcacaatcagcagactgcccgttccgataatcgcgatcagtgccgtttttacattctcccgcattgcctgcgtttctttctcaacagtctcatcgatatagtcaatatagtttcccgttccgacaacccagccaaaccgctcaaatgccctgctgtaggatctcttcggagaagattccgtctcaccttctttcgggaatacataatccgtatatccgccgtccggttcctgcccgacgcggataatctcttttaccatctggtaaccatccgcatccttcgtctccatgcggttcgtcccttccgtcgcgcttccaagcagaaccacattctctccatcataggtatctgcccagaagtatccgccgtccccgtacctgagttcccgcagcagatctgcaccgcgtgtttccgcttcctcataggaataatcatcttctaacgtacactcacatttttcatacctatccgactccttcctgtgcttacttcttttattatcgtatattccccactaatcgtctatatttgttaataatttagcaatctattcatgttttttgtcaatattgcatatatgtaaaaacgcaggactcctcttttacaatcacagaagtctgtctaaagacattcacccgcaacgcagttacactaaagccacaaacggtgagcggcacatcagaccgccactcatacaaccagaggggaaccgggtggggccggtttccacactaagaaaatggagggactttacatggcaaagtacatcatggcactcgatgccggaaccaccagcaaccgctgcatacttttcaatgagaagggtgaaatgtgcagcgttgcccagaaagaatttacacagtatttcccgaagccgggctgggtagagcacgacgcggaggagatctggtccacacagcttgaagttgccaaggaggcaatggcaaatgtgggcgcgactgcagccgatatcggggcaatcggaattaccaatcagcgcgagaccaccatcgtatgggataagaacaccggcgaaccgattcatcacgcgatcgtatggcagtgccgccgtacttccgaatactgcgattccttaaaagccaagggactggttgataccttccgccagaagacaggactggtgatcgacgcctacttctccggaacgaaattaaaatggctgctcgacaacgttgaaggcgccagagagagagccgagagaggcgagctgctcttcggaaccgtggagacatggctgatctggaaactgacacagggtcaggttcacgtaactgattactccaacgcttccagaaccttgatgttcaacatcaataccctggagtgggatgaagatattttaaaagaactgaatattccaaaatgtatgctgccggaaccgaagccatccagctgcgtgtacggcgaagcaaacccggtattcttcggaggcccgattccgattgccggtgctgccggtgaccaacaggccgctctgttcggtcagacctgtttcaccgccggtgaggcaaaaaatacttacggaaccggctgtttcttacttatgaacaccggcgaaaaacctgtattctccaagaacggactggttaccacgatcgcatggggtctcgacggaaaagtaaactacgcactcgagggttccatcttcgttgcaggtgcctccatccagtggcttcgcgatgagatgcgcttcatcgattcctctccggattccgaatacatggcaagaaaagtcaaagacaccaacggctgctacgtcgtgcctgctttcaccggtcttggtgccccgtactgggatcaatacgcacgtggaactatcgtaggcattacccgcggtgtgaataaataccatattatccgtgcaaccttagagtctctcgcttaccaggttaatgatgtattggctgcaatgaaagcagattccggtattgatcttgcagcattaaaggtagacggcggagcaagcgcaaacaatctgctcatgcagatgcaggcggacatcagcaatgctccggtcaaccgtccgatgtgcgtggagaccacagccatgggtgctgcctatctcgccggactggcagtcggctactgggcaagcaaagaggatgttcttcagaactgggcaatcgaccgcaccttcacaccggagatcaccgacgaggagcgtaacaagaaagtccgcatgtggaagaaagccgttacttattcgttcaactgggcgaaggaagactaacacacaatttaatatctaagagggggtatttattatgacaccatatattgcagagtttgtcggcaccatgatcctcatcctgttaggtgacggtgttgttgccaatgtcaacctgaacaaatccggcatgaaaggtgccggtgcagtccagatcacacttgcctggggtcttgccgtactggttcccgcctttatcttcggcgcggcatccggcgcaagctttaaccctgcattgaccatcgcgcttgctgctgacggcagttttgcatggagcatggtaccgggatatattgtggcacagctggctggtgctttctgcggcgcatgccttgtatatctgctgttcaaagatcagtttgacgcaacagaagacgcggcaacgaagcgcggcgtgttctgtacggcacctgcagtgcgcaacatcccgcgcaatatcttaagcgaggctgtcggcacttttgtactcgtatttgccatcaagggtctggcacaggttccggatctggcggacggcaccggaaaatttctcgtattcgccattatcgtatctgtcggtatgtctctgggcggtctgaccggatatgcaatcaatccggcaagagatctgggtcctcgtcttgcacatgcagtgcttccgattcagggaaaaggttcctctgatttcggatacggactcgttgttccgatcgtcggaccgatcctcggcgcattggctgccgtgctggtatatggacttattttttaaaactatagattgaatgtcagagaagagagccaggcagaaaacacatcagaaatgatgtatgatctgcatggctcttttaaggaggaaaaactatgtatgatgtagtgatcattggtgccggcgtctctggaagcgcctgtgcacgtgaactttccagatacaatctctccatttgtgttgtggaaaaagaggaggacgtctgctgcggcacttccaaagccaacagcgccatcgtccactccggtatcgactgtaaacccggaaccctgatgtcagagatgaacgtccggggaaatgaactgatggaaccgctctccaaagagctggattttgaattccgcagaaacggttccctgatcgtctgcttctccgaggaggaccgcccgaagctggaagccctctacgagcagggcattgccaacaaaatcccggatatccggatcttagatgcacacgaagttcatgagatggagccgaacctctccgaggaagtcgtcgctgccatctactgtccgaccggcggcattgtctgcccgttcggtttgaacattgcactcgcagaaaatgctgccacaaacggcgtcgaattccgttttaacacagaagtgacagacatctgccgcaaggacgacggctatcaactctccaccaaccgcggttacatcctgacccgctgcgtggtaaacgctgccggtgtgtatgcagatgtttttcacaacatggtcagcagcaagaagatccacattaccccgcgccgcggcgaatactgcctgctcgacaaaacaaccggcggtctggtcgacaagaccatcttccagcttccgggcaaatacggcaagggcattcttgtaaccccgacggttcacggcaatacgctgatcggccctaccgcagacgatcacgacgataaggaggcaaccaacaccacccgccagggacttgaccatgtctgcagcgcagcaagacgctccgtgccttccgttccggttcgtcaggtaatcacgtccttcgccggaaaccgcgcccatgaggacaaccatgaattcattattgaagagttggcggatgctccacactttgtcgactgctccggcatcgaatctccgggactcaccagttccccggcgatcggcgagcgcgtagcgcagattgtatccggactgcttcacgcacagaaaaacccggcatggaacggcagccggaagggcgttctcaatccgaaaacactctccgaggaagattatgcggcgcttatccgcgaaaatccagcttacggaaatattatctgccgctgtgagatgattaccgagggagaaatcttagacgccattcaccgtccgcttggcgcacggtcattagacggcgtcaagcgccgtacccgtgcaggcatgggacgctgccaggcaggtttctgctcgccgcgcaccatggaaatcctggcgcgtgagcttggtatctcccagcttgaaatcacgaaaaacggcggctcatccaacatggtcgtcggtctgagcaaagacagaacctgaaggaaaaaggaggattattatgacttcatatgatattgtgatcgtcggcggaggtcccgccggtcttgcggcagccgtttccgccaaaaataacggcatcgaccggatcctgattctcgagcgcgaccgcgaactcggcggcatcttaaatcagtgcatccacaacggtttcggtcttcacacctttaaggaggagctgaccggcccggaatatgccagacgctttatcaatcaggctctcgatctgaacatcgaataccgtctgaacacgatggtgatggatatttctctggcagaaggctcttccgataagatcgtgacggctatgaaccgcaccgacgggctgttccacattaacgcaaagaccgtgattcttgccatgggctgccgcgagcgttcccgcggagctttaaatatcccgggctaccgtcctgcaggcatctactctgccggaaccgcgcagcgcctggtgaacatcgagggctttatgccgggacgcaaggttgtgatcctcggctccggagacatcggcctcatcatggcacgccgtatgaccttagagggcgccgaagtcaaagtcgtcgccgagctgatgccttattccggcggtctgaaacgaaacattgtacagtgtctggacgatttcggtattccgttaaagctgagccatactgtcgttgacatccgcggcaaagagcgcgtggagggaatcacactggcacaggtggatgaacacaacaagccgattcccggcacggaggaagactacgaatgcgacacactgctgctctcctgcggtctgattccggaaaatgagatttcccgctctatgggcgtcgagctaaatccggtcacctccggtccttctgtcaacgaaagccttgagacaaatattccgggcgttttcgcctgcggtaatgttcttcacgttcatgatctcgtggactatgtatccgaggaagccggcgttgccggaaagaacgccgcaaaatatatcaagtgcgggggcgatcatgctgattccggcaaagagatccccatcgtcgcaaccgacggcgtccgctataccgttccaaaaacgctgcatgtcgccaatatggacgacgagctgaccgtgcgtttccgcgtcggcggtgtatacaagaactgttatatttccacctacttaaacgaccagcggatcatctgccgcaagcgtcctgtcatggctcccggcgagatggagcaggtaaagctgcagaagtccgttctggaagcaatgagtgacctggatcacattaccatcaaaatagaagaggaggcgtaacacatggaaacaagaaatcttacatgcatcggctgcccgctgggctgtgccatcacagttaccatggatggcggaaatgttgtctccatcaccggaaatacctgcaagcgcggctctgactatgccgcaaaggaagtcacacatccgacgcgcatcgtcacaagcaccgtctgtgtccgcggcggctccatcccgatggtatccgtcaagaccgcacaggatattcccaaagaaaagatcttcgagatcatgaaatatatcaacgcgctgacggtgacggctccggtacacatcggagatgtcctgctgaaagatattgcaggaaccggcgtcgacctgatcgccaccaaagaagttctctcttagaaccgcagatgcagctgcaaaagtaaaaaagtactggtaagccagaccagcttaccggtactttttaattttgtcagaatagcattacaatactgcggtgcgcgggagcaatacggcaagccccgcgtccggttttgcaatcgcccgcatcataaactgcacatcccgctttacctgttcccccgataacgtttttctgtaatatacaaaatcaatcatatagtagcagatggatgtggaaagaaagctcgtcaccgcctccagttcctcgggatgcttttcaaacatgcccggattctcgccaagcagcagacggcgcacctgcgcatccaacgccatgcgtacaccacgcacgatcatcggccacgcgagctcgttcgccagcttctcataaaagctgcgctccctctgcagcacctccatcagatcgcatgcccacttttccatactgtcatactgtccctgcagctgatccttaaagtcattacagccgatccactccagcacatcataaatatccttaaaatgataataaaaactctggcggctcatccccgttgcctccatgatgtccccgatcgtaattttggatatctccttgcgcttcatcagctgcctgacacaatccgcaatttttttcttagttgaataacacatacccgtacccccttctcctgatacactgtatccgttacattttccacactgcctggtttgtcgttgaaatcgcaatcgctcccgcatccagtgcccgcatgacgtcctccttctccgagatcagacctcctgcgatcaccggtactgctgcctgccctactatatgctttatgattttaggcataatgcccggcagcacctcgattagatctgcaaactccataccgtggtgttccagtcctccaatcgccttggaatcaatcgcaaatatgcgaaataccgtacagagatccagctccttcgcataacggatcatttccggctttgtggaaataataccgtccgccgccgtcccataccgtataaaacgcaccgcttcctccctgaccgcaagccccccgatcagatccagatgtacaatgacaaactttccggcatcttttaaccgctgcacgatatccgggatggtaatcaactctccatacaaaatgaataccacgcggatatcattctgtatacagacctccacccccgtctcgtccttcaccgccgcgataatcggtccgtccacaatcgcgtcataaaattgctgcttcatcttttgtctgcactccccccattctcccctgccgcatcatggcattcctggcgcatcatttccataatgatatttcccatagcggaagtcaaaaaatcccgcaagctgcacattctttatttcttcatagggcgtaatttcctatgaaaaaaagcacaccgacagagtaacatttctgttattcccggcctgctctttcactcttggctcacactatagaattgtatgcaaaataccgtgtaatttctttctgacattattataactatgtcaaaaaggaaacgcaaccgaatttcagattttgcatttgacaatttcagcgttttgtcaaaaaactcacatcggattctcaaggtattccgccagcacctgatataaccgctgcggctctaccggctttgcaagatagtcgttcattccggcttccttacaggcatccatatcctcgcgtgcatcttttgcactcatcgcaataatcggaatcatctgcgcatccttgtgcgacacccgtcggatctgccttgccgcctcaaagccgtccatcttcggcatcacaatatccatcaggatcgcatcgaaataatgcgcttccttctccataaaaagacgcaccccgattcccgccggacatgcgtctcttattgtatctttatgtatgccttcgtttcgatatgacatatatgccttcgcttcggtatgccttagcttgtcatctctgtgccgtcataacgtgccagatccatgatcttctgaagctccgctccctcaaccggcgcctcgcccagactctcatgcctgccatccggcaggatctgtcccaatgcgcgcacttccttctccgccgtcatctcaatcgtgtagtaacccgctttcttcgtctgcggattaaacgtaatatagatacgatagcaaagcggggctgccagtgctttctccggcagatccacgcggatcagtgtcagatcctccgcaatgtcaagcgccataaccgaatagtctgcctctgtgtacggatagagcttcggctccttatacgtctcggcaaaaatctggttcacgaacgcctcgcgctcctcacagagcttctggacaaacgtctctccctctgcatacaggcgcttcggcagaactccaaactccacctgctttttcacaaacacgttaaactgctgcggtgtcatcttcacctgccgcatctgtgccgccttctgatctgcctcatgcagcttccgtacaagttcggtctttaatacaaggttatccgagaacggattgatgaccagcccggtcagctccagttccggcttcacgacgatgttgttgcacgccgggaacggcatgaaaagaagtgcctggctcttcggctcctccggcatctgctccttggaagtatatgccacaaaaaactgctcgcccttgttgttcttgaggaaacacggggtcggctgatccggcgccttaagcattgccggcacatacagcttggtcggacgaagcaggtttaacaccgtggtaaggttctccttggtgcgctccgccgcatactgcttaatcgcttcctctaatctatcgttggtaatctccattgtcattttctcgtccatcttataagtatcctttcctatgctccgatgtcgctaaaatgaattatatcatatctttcccataaaatgaactgttttctaatccacaacaaagactgagatatcctgtgtcagacgctgtgccgtctgatcgcatctgccaacttcatctgtgaccgtatccgcctcggatttgacttccacggtcttttgtgcaatatctgtcgttccttttgcaccttcgttggttgccgttgcaattccctccatcgcatccagcactccatcgattgatgccagcagttcctccgatgtcgcgctgaaatcgctgatcagtgcatcaatctttcctgcatcctggttgtatgcatcagccaccgcatcgaacatgtcatagcttgccacgacatcatttcccacaaatgcaagcagctgctccgcatcggaagaaagctgtgcgacagaagtcgtaacttcctccgtcaccttctgtatctgggtaacagtctgcttggactgatctgcaagtccgccaatttctgttgccacaacggcaaatcctttgcctgcctccccggcgcgtgctgcttcaatcgaagcatttaacgcaagcaggtttgtctggtttgtaatctccatgatcgccgatgataacacttcgatctgctgaactacctttgcagcctcaagtgcctttgtaaggctctcccgtatctcattgtggatccggctcgcatgctcacgctgttctctggtatcgttctgtgcctttgatgcccgctcgtgtatatctgctgcctgctgtgccccatcctgcgaacgatttgcaatattttttgctgcctcttcaatctcaagagacatgctcttaatcgtatccgaggatgccgcggtctcctccatgcttgcagcaagttcctctgtcgttgcggaaacgtcctcgatattgccgttcagcgtaatcacattcgtcttgaccgtatcgacgacctccccgattacataactctcatttttcacttctctgataagatctctgatctggcacttcatattctcaaggcgctcgccgagaataccaaagtcgtccctgcggttctcaagctgtaccggcagcggctgcgaaaaatcaccctttgtaatataaccgatgtacgtgagtgcaacctgaaatgatttgctcagtgaaaacgccatataaagacagaccgccataacaatcacaaccagaaaacttcccattccgataatcgcaagcagtgcactttttacattctccttcattgcctgtgtctctttggcaacagtctcatcaatataatcgatataattgcccgttccaacaacccatccaaacggctcaaatgccctgctgtaggagcgcttcggagaggactccgtctccccttccttcgggaatacataatctgtataaccgccgtccggctcctgtccgacacgtataatctcttttaccatctggtaaccttccgcatcctttgtctccatacggtttgttccctcggtctcgcttccgagcagaacaacattgtctccgtcataggtatccgcccagaaataaccaccgtctccataccggagttcccttaaaagatccgctccgcgcgtttcggcctcctcataggaatagtcgccgttttcatagcccgcatacaccgcatccagcatggaaattgcattatccacctgattcttgatattctcatcataatcatcttcaatacttgtacggagaacgctctctgatccctcctccataaccagcatccggttcactgccagaactccgatcgccagtgttccaatcagcgtaatcagcgcaagaataatcatcttccaacgcacgctcacatttttcatacccatccgactccttcctgatagttatttcttttattatcctactttttcatttttttgtctatagatgttaattattttgcaatctttccccgctttttgtaaatattgcacatatatcacttacaaataacgcgataacacttacggaaccggatgattcttacatatgagtaccgtagaaaagcctgtgttcttctggaacggactgattcccacgtccccgggctgacagcagatgtcttccacatgccagcacccctgcctcttccattacgaagaagcaggggtgcgctttttgtttctatatgtttttaaaaacagtacctgttacaccgtttttttatcttctgcaactttgaatttgcggatcatttcacgcagactttccgcctcactgctcatctcctggctggcagctgcacattcctctgatgttgcagaatttgtctgtacgacatcattgatctgctcaattccctcattaatctgcttaatttctgtcgtctgtgtctccaacgtctctgcaatatttgtaacttcagtcgtaattaatttggaattctcagcaacctcttctaattgtgccgcagtctgtcccgcaatcaccattcccttttccacagctttcacagaggtttcaatcagagtcgcagattcctttgccgcctgggcgctctgatctgccaatacgtttacctgatttgccacaactgcaaatccctttccagcctctcccgctcttgcagcctcaatggaagcattcagtgccagcagatttgtctgggatgcaatttcgttgattgtcgtgataatcttatcaatctcctttgatgcctcgctgatctcatgcatggaatcaaccatttcatgcatcttgccattactttctgaaatggcatttccaagttcatccacttttacactgatttctttggcagactgtgaatttttttccacctgttctgaaacacctgtaacagttgcggtaagctcctctactaccgcagcctgatttgtagctccatctgcaagatcattggagcttgatgccacctgctctgctgcgccggaaacttcattggaaacattctggattcctttgatcgtacctgccatacttgcctgaaatgccataaacgaatttaaaataccgacaaaatcacctctccactccacctcaggatgaacatcaaaatttccttctgaaaagagcttcatggagcggtcaatatcatctacataggttcccagtatacgaattgatttccgcatactgtgtgccagttttccgatctcatcatcggaatgatattccagcgtactgtgcagattcccttctgttaattccattgcaacgtcctcaatcgcatgtaatggctccaaaattgtttcaagtactctcttacttgttttccgcgtcaaagtaaatgcaaaaaccaggcagacaataatcacaacaaatcctgcaaccgtacagactaccatatttctgactgtctcgctacttgcctcatctgtcagttcatctaattttatcgcaatttctactactttatttaaagccggggtacaattattaagaattgcatctgtggcattctcatcgtttccgttttttatttcttctataatggaataaccaatttttccccagtcagaaagagccgttgcatattcctcgtaattttcatcggaaaggacttccgttttctttaaaatctgcagttcagaatcaacttctgaaagcagtctttttactgtttgttcatagttatcataagaggatgtatcctcatttaatgccatctctctgatatttcttgctgcagcattaacgttaatcctgcagatttttactgcctggtctgctacattaacattctcaacataatgcatcatattggcaaacaatacacctataattacaacagaaagcagaccagagatcaacatcattgtaatgacttttctatatccgtagtctatcctttcctttaaatgcatgttttccaatttcttcttcatcatactctcttgtgacatcatgggattattattcctttcgcttatttttagtatatccttagtactaatacactaatatatcaacttctttttaaaagtcaatacacgtcatttattttatttttattttacatctgaccgtttcggcaatctgtccaaaaactcacatcggattctcaagatattccgcaagcacctggtacagtctctgcggctccaccggctttgcaagatagtcgttcattccggcttccttacaggcatccatatcctcgcgcgcatccttcgcgctcattgcgataatcggaatcatctgcgcatccttgtgcggcacccgtctgatctgccttgccgtctcaaagccgtccatcttcggcatcacaatatccatcaggatcgcatcgaaataatgctctttcctctccataaaaagctccagcgcctgccgtccatcttccgcacagacgacttccacgccccggcgctccaaaagcttccgcgtaatctcaacattgagcggatgatcctccgcgagaagcacccgcttcccctcgagcgcggcaaacgcctgtctggaacccccgcctcttgccacttccttctgcggctgaatatccgcgagcggaagatccagatgcaccttcaccttcgtgccctcgccgatcgcgctcgtgactgcaatacttccgcccaactgctgcacaatattctgtgtaattgccagccccagtccgctgccgtgccgccgttccgcctcatcccgtctttcctgcgtaaacggctcaaacagcagtttctgaaactccctgctcatgccgattccggtgtccgcgacaacataatccgcagaaaaagtaccgctgtgaactgcataattgcatacccgaaaggagatctctcccccctccggcgtgaacttgaccgcgttccccagcagattaaaaaagagctgctccagccggatcggatccaccatgacattcagattgttctcgcctccggacatgtaaaatgtgatcccctttttggcgcactccggctctgtcatgtcccggatggcttccataaaatcctcgagcgcatacggcttcggatgcagccggaatcttcccagttcaatcatggaaacatccacgagatcattcaaaagccccatcagaaaccggctcgccgtatcaatttttccaagacattccaccatcttctccgggtgatccgactcttcaagtccgaccgccgtcattcccatgatcacgttcatcggcgtcttgatgtcattgctgatgcgggagagaaaatccgtccttgcatccgcgacatgctgcagcgcctcatccctctcacgttctgccttccggatcaaaacgatgctgaccgccagtatcgctccgagaagcagcaggaaaatcagcagcaggattccgctttcccccatggtctttttcctccaacaagtatcattccgacaagcagcaccaccactgtcgccacctgatccggtgtcccaaaaacaatgtcacgcacaaaactccacgccgcgtgaaacgctccgattccccatatatttccgcgccggatcagataaagcgccgcgaaaataccgaacagcataccgtttaaaaatgcaagcggcgcctccacggctcccgccgcgtacggaagcgcaccgatcaccgcactgataagcaccgccaccgtcatcgaatagcgccgcgcgatcgttaccatcaggtaactgcggtacaaaagctcctccgccatcccctggatcagatatcccaggagaaacagcaccagcatccccggcgccgttccggtaaacagcttcgcatttcccgccgccacagcgataccccccgtgactaccgcaaataccaccccaagtcccagtccaatggcatattcccgcagcgcgtgctccttcacaaaaccgatcatctcaaagctgcgcttctggaacttcctgcagaataagacgaccaccagaagcatggcaattccggaaaaaagctttaacaccgcgtaggcatccgaacccgcaatctgcaccgacacctccgacagctgttccatatccccggaggcagccgcatcctgatatgccgtgttcgtattcagcagcacaagctctcccggcagcagaatcagcatctctccaaatgccgcaatgatgtacaccgtcacaaacaccagcaattccaccagccagtgctgccccttctgtacctttttcgactgctcaacgagcttcggacaatctatgctctctttcatctcaatctcccatcctgcgtgtgggcttctgtctgcccgctgcgacatttcattttacggaaaactgcctgtttccgccgtttttctgcacttatcataacataaaaaatggagcgatgcaaaaatttcctgcaccgctccacacgaattttccggctcatttcttccgccggctgatgcttattccggctcacttcttccgccggctgacttccatcctggtccggttactaacgccggattcctatcccagctcgattaccgcaacctcacagctttcgagtgtcagcgcgttcgctttttcacatgccatctccaccgcactctctgctctcagattcgacagcaatacctgcctgcacggataggcaagcggcagggaaaccgcatccgttccaaagtttgctgcgaccagtatacgctgtccgctctccccggacacacggtaatacgcaaatacatccgccatttcctggtaagccggctcgaagataccgtaggtgaatgtttcccggtaggcgtccgccttgcgcagatgcaccagtctccggtaataggcaagcaccgaatccgtccgcgcctcctgctccctgacattaatctgccggtaattcggattcattgccagccacggcgttccgtccgtaaatccggcattctcatcatccgtccactgcatcggcgttctggcattgtccctgctgttctcgtagcagcagcgcagtgcctcctccctgctgcagcccgcgtcaatggcaacctgatactgatccttcgtgctgatgtcgtcatactccgaaatgtcgttccggatgcaatttgtcatgccgatctcctgtccctgatagataaacgggatgccgcggagcagaatggatgtggttcccagcatctttttcccggcttcatttcttgcatgctccggcagatagcggctcgctccgcgcggctcgtcgtgattctcgataatgttcgccgcgaatcccgccttctgcaattttaactgggatgcaaacagcgtatcgcgccattttttgaattcgatcggtttgctgtcataccagccgtgttctccgtaggtcagctcatgtgcggaaaaatcaaacatggtggaaaaatgcccgtcatcaccgatgaactccggcagttcgtcctccttcatgttaaaaacttccgccacggtaaatgcatcccatttttcaaaggttgcatgttttaagtcctctaaaagcgcgccgactccctgcacttcctcaaccatcttcacacaggaggcaagtccgtcgcctccatccggcgggaatgacggaaatgccgtgtcttttttgatgttgatgattgcatcgatgcggaatccggcaagtcccttcgccagccaccagttcaccatatcgtagatcttctgacgaaggacaggattttcccagtttaaatccggctgctcttttgcgaacatgtgcaggtaatatttgtccgttcccggcaccggctcccacgcatttccgccaaaatacgagcggtaattgctcggctccctgccgtcttttcccttcacaaagtagaagtaatctgcatattcgccatccggatctgccagcgcctttttgaaccattcatgctggtcggaacagtggttcaccaccagatccatcacaatgtacatgcctctcttttttgcctcggcaagcagctcgtcaaactcctccatcgttccgaattcctgcgcgatcgcgtagtagtcggaaatgtcatacccctgatccacaaagggagatttataaatcggagagagccagatgatgtcaatgccaagctctttcaaatagtccagcttcgagataattccccgcagatccccgattccgtccccgttcgtatccagaaagctcttcggataaatctgatatgccactttatcgtgccaccattttttcttcattgcacattctcctttttcccaatacggtttttcttttcctttttgtatgatactgttattataataagagaaatccgtaatatcttgcactatattttcatttttattgcacaatactgctatttaatatcaggagaacgcacatgaacaggacatcccttccggcgccggagcaaaaggaacacgcccggcacggcgaacagctttttccactgcaaaaatatatcaccacgctggacgatctgcacccgtccgtcagcgcacactggcacgaggaagcggaatttacgcgcattctctccgggagcggcacctatcagatccagctgcagcactatgacgttgccgcgggcgatctcctcttcatccctccggcgctgttgcacgcaatcaccgtgacgcccagagagaagctttgcaccgagacttatgtttttcacatgcattttctcggcgccagcaccgcggacatctgctccgtgcagtatctgacaccgcttgcgacggcaaagctgatcccgccgtttttctttgatgcccgtcatccgctgcacgatgccttagacgatctgttcaacgatatggataccctgcacgacgacgccgcgcagggctatgaactgctgctgaaggctgattttctgcgcctgatcgccctgcttctcccctgctgcaacgcagcggatgaggatacgcggcttcacatggaatataccgccaagttaaaaacggttctcgagtatattgacgcccattatgcggaggagctttccatcgccgatctggctttcctgtgctatttcagcgagtatcatttcatgcggtttttcaagcgcttcatgggtacctcctgcttaaactacatcaaaaacctgcgtctggagaaggctgccgagctgctcgggcaggacgggcttcccccactggacgcctccctgtccgccggcttccacaacctgtcctacttctaccgggaattccggaaaaaatacggcgtgactccggggaattttcgcggagccggtgcccgggagaagtaggctttataataggaaatatcattccggcgcgaagcagcggggcggagtctttgaaacaaaatgcaagagtttcttccctgccgctttcggcaattcattccgtgtctttgccacgcttgaacaatccgcgaatgtgtccgacaaacccgcagacaatgagcggacttcctagcagcactaagcacacctcttcacagacatgataaaaccgcgcgagccgaaactcgttgctttctgctattaaaaacaaggcagaaagcagctcaaacatcggtctcgcgcggttatgttttgctcatcggtgtgcaaagtgctgcacgtaagtcctaaaattgtctgcggcttgcggacacattcgcggagtgctccaagcctggaaagacgcggatcatcgcagttgtcgaaagcggcagggttagaaagtccgtattttgtgatcagactccgccctgctgcttcgcgccggaatgcgattgcctgttataaattcccgtaaagatcgcttttccccggcaggctccgtgaaaaccaccctgggcatgccccatttttcgatcagcggctaccgcaggcgctcctcgcggtactccttcggcgacatgccatattcccggcggaacgcgcggtaaaagctggaatagtcccggaacccgaaccgctcatacacctggctgatgttctcacctcctaaaatcgcctcccgggacgcctgcatccttttctttaaaatatactggtgaaccgagattcccgcctgctccttaaagacgtgcgccacataatagcggctcacgaaaaaggctcctgccagtttttccaacgacagttcctcctccagatgctcctctatataatagatcagattctgatagagatcctgctcctttaccttggcgggattttcttcctcgtacaccatccggttcaagtgcaggatcagatcgttgaccagcaacggtatccgcgcctccctcccgaaacgctccatctgcatctcctcaatcagctgaaagatcttaaactgcgtggcgttaaatgtaatcacatcactgtgaaacacatttttcccggacacttccgcgcgctgcatcaggtagccatatgccagggaaagttccatcagctgggcggcatattcccggctgacccagaacacgaaccggcggtatgcctgcgcatggttgtgcacaacggcacggtgcctgcggtgcggaggaattaccaccatatccccatagcggagcggatatctctgcccttcaatctcaatcgagacatccccctccataaaaaaatagaactcatagtagtcgtgtgtgtgtgtatccacttttgacgtgtaatgttcattgtaataatatagttcaaaatcgcgggacagcatgtactgtctggtgctgaatctggtctgtaaatttttctgcatacgctattcctcttccggcaccttttcatgccgccatcgatccgttgctttcctttttcgtcttatattttttcaaactcttccctgattatagcggaagatagcaacttttgcaatgtatgcaacaagtctttcaatttgcttttggagcggattttatataatgaaatcatccaatatgacacttccttaacggagcagaaaagaacggaggttacacactatggaaatgactttaagatggtacggttccaaattcgacaccgttaccttagagcagatcagacagattccgggcgtgaccggagtcatcaccaccctctacgataccgcaccgggtgaggtctggagcagagagcgcatcgccgcattaaaagcggaagttgccgccgcaggacttcatattgccggtatcgagagcgtcaacgtccacgacgccatcaaaaccggcgcaccggaccgtgatctctacatcgatcactacatcgagacactggaaaacctcggaaaagaagatatccacctcgtatgctacaacttcatgcctgttttcgactggacccgcacggagctcgccagaaaacgtccggacggttctactgtcctcgcttacacccaggaggctgtggatgccctcgatccggagaaaatgttcgagtccatcgccggggataccaacggcagcatcatgccgggctgggagccggagcgcatggcgcacatcaaagagctttttgccatgtacaaggacattgacgatgaaaaactgtttgccaacctgaagtattttctggagcgcatcatgccggtgtgcgacaagtatgacattaacatggcaatccatccggacgatcctgcctggagcgtgtttggtcttccacgcatcatcatcaacaagaaaaacattctccgcatgatgagcatggtcgacaatccgcacaacggcgtaactttctgctccggttcctacggaaccaatctggagaatgatctgccggacatgatccgctccttaaaggggcgaatccattttgcccatgtgcgcaatctgaaattcaacagcccgacagactttgaggaagccgcacatctctcctcagacggcacttttgatatgtatgaaatcatgcgtgccctctacgagatcgggtttgacggtccgatccgtccggaccacggacgcatgatctggggcgaagtcgctatgccgggttatggcctttatgaccgcgcacttggcgccacctacctgaacggactttgggaagcaattgagaaaggagctgcacgctatgaagctaaataacaaaggattagagaataagaacgcatgggaagctgccggttacgcacttccgcagtatgacagagaggcggttgccgccagaaccaaacagaatccattctggattcatttcggggccggcaacattttccgtgcctttcaggcaaatgtggtacaggatcttttaaacaagggagatcttgaccgcggtcttgtcgttgccgaaggctacgattatgaaattgtcgagaaaatgaatcatccgcatgacgactacagcattcttgtcacattaaaggcaaacggcaccgttgagaaaaccgttgtcggcagtgtaatggagtctctggcactcgattctgaggatgatgcacagttctcccgcctgaaggagattttctccgcagcctccctgcagatggcaacttttaccatcacagaaaagggttacaacctctacggttctgacggaaacttcatgccggcagttgccgcagatatggcagcaggtccgcaaaagccggccagctatatcggaaaggtcgcatctcttctgtatgcacgtttccttgcaggtgagaagccgatcgccatggtaagcatggataactgctcccacaacggagataaactcgcggctgccatcacagcttttgcagagggctgggtaaagaacggtcttgccgatgaggcatttgagacttatgtaaagacttccggcaaggtatccttcccgtggacgatgatcgataagatcaccccgcgcccggacgcttccatcgaggagatcttaaagaaagacggcgtcgaggaactggatccggttgtcaccagcaaaaacacctatgtagcgccttttgtcaacgcagaggaatgccagtatctcgtcatcgaagacaacttcccgaacggtcgtccggctctggaaaagggcggtctgatctttaccacacgggagaccgtcgacaaagtcgagaaaatgaaggtctgcacctgcttaaacccgctccacaccgcgcttgctgtctacggctgcctgctcggctacaacttaatctccgaggagatgaagaatccttctttaaagaagcttgttgaagtgatcggatataaagagggactcccggttgtcatcaacccgggtattctcgatccgaaagaattcatcgataccgtattaaatgtccgcattccgaatccgtttatgccggacacaccgcagcgtattgcaaccgatacttcccagaagctggccatccgtttcggtgagaccatcaaagcctatgcggcagctccttctttgaacgttgccgacttaaagctgattccgcttgtatttgccggatggctgcgctacctgatgggtgttgacgacaacggcaacgcgttcaccccaagcccggacccgatgcttgcagaagcgtcctcctatgtcgcagacgtaaaactcggcgaagcgttcgatgcaaagaaaacgcttgcaccgatcctgtccaacgcaaaaatctggggcgttgacctgtgtgcactcggtatggatacgctggtatgcgattactttaccgagcttaccgcaggcacaggcgctgttgcggcaacccttgcaaaatatacggcttaatccagagacaggacaatcctttttcctgttacttatcacgtcaaaagggactgcccgtttatgtggcagccccttcttctatctgcgatcgctataccggctgctgaccggaaaacatcgcaaaatactcctgtgctctctgcgccgaaatatgcagtctctcctgcaaccggttcagtatcatctctttaggcatgccaaatgcacatccggtctcaacaatcccctgtgcaagaccacggttcatgccaatctgctctccctttttcaaacctgcctgctctccttttttcaagcctgcctgttctcccgctttgtattccgcctgccgtagcttcttctcctcatattccttatcatattccagaatactcaccatttccacctccgcgcggttttttcgcagaaaatctgttaagattccctctgtgatacattcccttatcgcccgacgtaccgcctcttccagcttaatgccattgttctacaagagtatacggatcaatttaaaaaaatttaataaataaaaagaggcatatctgctatgcctctctcccgctatatctttgcttttacaaactgatatatcttttccgcactgtgcttttccattccctggcactgtgctctctgcattgcgtttttcttaccggaattatgaagcagctgcattccttttctgaccaggccatattccgtgtatgcggtcacgctcattccctttttgacaaaaaagctccggttctttgtctcacatcccggtatcggctttgtgtggacaatggaaatctccgtcactgcggcctccgtggaggtgagtccgccgggttttgtgtaaatgatgtcacacgcacgcagataaaccggcatgttgctgacgcttcctaagatcgtcacgcgtgcatccctaccgaagcgcgcacgcatccgctgctctagcttctgattgctgccgcagatcagaatgaggtgttcctccctttgcatgcgccgcagcaatgccggaatcagccggtcgatcgatcccgctcccatgctgccgccagccacaaggatatacctctgcttttcttcgagtcccagactctttttcgccgcctgctgcgcgtttttgcgcacaatgctgtgcgtgtgtgtatccgccgcagcactttcttccggcataccgctccacggctcactgcatgccgccgccaccggaatgcccgttaccaccagcttttcttccgggattcctcgcttcacaatctccgggatcagactctcgtgcggaatcatataatagtcgcagtccgtctcttcccagaacgggatacaggtataatccgtcatcaccgccaccgtgagcggaagcttcattccctttcgcttcatataggtaatggtttccgccggatacagatgcggcatgacaatcacgtccgccggatgtttcttcagataagccgccaggtagactgccatcttcccgttgacataatagaccggcgaccggcggagaagccggctgacaagcatgccgatcttatacaaaagtccgaacagacccggggcaatctttactgtctccacatagacgttaccgaccgtcctcgagaccttctctcccgcaagcttgagataatccagcaccaccgcctcgtccccgtgcgcacggaaaacctccgcaaccgcacgtgccgccgcgttgtgaccgccgcctgtattacatgataaaatcagtacgttcatttttttcctcccccaggcatccgaatgtgtgccggtagataaccgttccggcaatcagcaggcttcccatcagaaccggccgctccttcaccgtaagacaggttcccgctgcaaaacacagatacgtcacaacgctccgcctcgcatggcttttgatcttaagcaaaagtgaaaacagcagataaaacagcaccagcatcgctagcggctgccagattcccgccggcaccagtcctaagagaaccccgaaggataccgcgatcgccttgccgccgcgcccgcggtgatagacggaataggcatgtcccagcactggtgccgccattaccgccgcaaaccacggggattgcagacccacagtccgctcgcacagccataccgggaaaaatcccttcaaaagctccagcagcaacacacagattccacagactgtgccgccgtaccggaacgcattgtaggtcccgggattgccgtcctccgacatctcccggatatcgatatggcgggtcagcttcggaagcacgtaagcaaataaaatgcttcccagaagatagccgccgatcacaaatcccagataactgctcataaccgctgctcctatcgctctcgtttctaacactgatatgtaatgtaacatattttctgtcataagaaaagacagggcggcagaaactctttctgtcaccccgtccttttcgtttatttccattacactcccctgtaataaaaaagaatcttgcttgcgagattctccgcgcgcgagcggttcgcaaagcgatattttccttaccgcgagctgcgcatcctcgcggagcgttttttatttcataggaaagttccactttcacacatgaatgtatcacggtatttcctatgaaataaaaacaaaaccggatatcggaaatgcccttgcaggcgttcttgtcactcacgcagcaggtacgcatccctctctgctcccgtagataccagataaatcggatgatccacgagtttctccagtgtgcacacatattttctggcattttccggcagattcttccagcttctgcagccggaaatatcgcattcccagcccggcagttcctcgatcaccggttctgcctcctcgagtctgctgtccgtcgggaaagaatcaagcaacacaccgtgcagacggtatcccgtaattaccggaattttatcaaatgctccgagcacatccagtttggtcagtgcgatatcctgggccttctggcaccggatgccgtaacggcttgcaacagcgtcaaacggtccgacacggcgcggtctgcctgttgctgcgccgaactctccgccgctctcccgcaatttttcattccaggcttcgcccatcgccgtctccgctacaaacggtccctcgccgacacatgtggaatatgctttcatgacgcctaccacgttgtcgagcgcgcagcccggaatactggcaccgatcggggcatagcttgcgattgtattggagctggatgtaaacggataaatgccataatcaatatcgcggagcgctccaagctgcgcctcaaacagaatatttttcccttgaccggcagcagcaccgagcaatgttcccacgtcgcagatataatctttgaaaaattctgcctggcttctgcaccactccataatctcatcataggagagcggctcctgattgtatacattctccagcaccagattcttgctgtcgatgataacttttaaacgatgctgtacggacggcgcatccagttccagcagatcgcccatccgaagcgtctttttcatatatttatctccgtaggcgtaggcgatgcctctccgggtcgatccgaatgcggaacccgtcttggaaagccgctcctcctcaagcacatcctgtctcacatggaacggcatgcagatggtcgccttatctgaaatcttaaggttcgacgcatccacttttactttcatatactgcatcattgcaatctcatggcgcagatgatccggatcgatcaccataccgtttcccagcacacagactgccgtcggatgcaggataccggacggaagcagattcagcacaaattttccctgatccgtcaccaccgtatgcccggcgttattgcctccctgataacggacaacatagtccgccttttctgtgagaagatccacgattcttccctttccttcatcgccccagttaattcccgtcactgatgttaacataataattgcctctctttctaattgcggatgtcctccagcttcttggacactcttgtctttctttttcttccggtatagtctgcgcggatgttctgcacaatccgattaaaatcactgtccgccaccgccacatcacagcaggtctccgagtctttgtctccatagacaatactgtgatgcacatgcagcatcttcataagccggtcaagcatgttccgcgggcttgcctcaatcgacagaatcttgagaagactcttctccccgaatacgtgatcctccaacaggaatttcagcttcccggcgaatcccatctcctcaagctgcttctccagcataatcaaccggttgtgcgtgtccagaacactgaaatacaaaatatgatcttcatcgtgcggtgcacgtttcatatagttgcggtacggcgaagtccggagtttctttaagtatcctttctggtcctcgtccaccagatcgttatagtaaatcacccacacgtcatccacgatgacattggtgaaaaatgcgcggttctgctccgtcaaaagctgccggatacggattcccatatcgtgctccatcaggcatgcatgcagatacctgttctgataaatatcatacagaaccgctccgtcaagggcgatcaccggcaggcgcagctttaagtgctcgacctccgcgatcaaagacgccggtgtctgtctggtaatcatggtaaaaagtgcgccctcgtcaatcatatgatttaatgctgtcttgttaaattcgctgatctgccggtgcgcactgcgcagctcatcatccagctccgccacgaacagcacatcgttgcgcttcttcccgtgtgtgtgaaaactgccaaccaggctgccgattcccacgccgaggaaggtatccaccaccctgtaaaacaggaattcatacggcgatactccgtcatgtgcgatgaccgcaacgcttaaatacgccacgcacgccatgaacgcaatgtactgtttgccgagcagcaccgtcagataaatggtaatgcagatcatcaccgcgtttaaaaggtcccaccacagttcgcctccgggcagacccttgagcggcatttccaaaagcatcgccaccgcaccggtgaccgcaccgatcaatgttccgatcgcacggttgaatgccgtgtcctttgtgtttgcaatatccggctggatacagatgatcgtcgtgatcagaacgtagaacggcgatcgctttgcccctaccgcggtaaaaatcagcaagatcagaaaagccgctatcgatgtttttataattctcatgccaatgcgcggcatactctttttcatgttctcatcccttttcagacacttctgacataacgttccatctcttcccggaaccccagcgcaatcccatctgcctgctcaatgttgcgttccatcgcatcgccaaaatgacgcagcgggaggaaaattcccagttcctcgcttccggtctcctgcccgtttacctgcattttcccgtaatacataaaggcgcgcggcagcacatcctgcagccgcatcagcgcgtcccatacatggacatacacctgcgcatccgtcagatgctcctgcaaatgttccggcatggcatagagcagcaggattcccagatgtcttccgatctccacgctctccaccgacagatcctcctcgccgtagcggtgctcctcgcggaaaccgtacgccagatattcccgcatctgcgggatcggctccctgtgctgatagattctgctgaacttctggtaaaccttgtccgggacgttcaccggaagcttctctcttaagattccctggtcatcggtcaaaagaatcgggtttgtcttgcccttgtcattaaaccggatcgggatcagaaaagagttgcgcagcagatcaaacatgctgtttccgcagatcgccatcagaaatgccgacagatctttgttctggtatgcctgaaacagcgccctcgtaaaggtctgtggcgataccgccggcatctgcgcatccatatcctccgattccggaaagtgctcataaaacgtatccttcagtctctcacacgcatccggattttccagaatcttctcaaacaactgctccgctttttcttcccttggaaaaatagttgccatcacactctcccctttctgtctgttctcacctgttccatgcacgcagcttttccaggaacattaacagcacactcaccatcagaagtccgcctgatacccagatcacatgtaccccgtaacgaaccgataagttgccgcctgccccggcgcccagtgcgaaaaacaggatgatgccaaaataataaagagcctgcttcaaaaactcgggacggcgctccctgaaatacatggaaagcgatgccgtaccgctccgcagattgccgatgcacatcgtgctggcataggaatagccgtccaccttccggaatgcctgcacctgcatcgcacaggagaacgacaccagaatggtcgccgtcatgttgagggtctgcggaagaaatccgacaatcagaaggattgcaatttccagcagcagaattccctgccgccagtgcagccgcctggcaaaacggaactgcgcctgtatccgctccgccgccagcacgccaaacgcgaatgccagaagcggcagcagatacttcagcccgtccttccactctcccatcataaaatgctggctcatcaacaccacattgcccgtctgtgcattggagaacaccttgtctctggtaaagtaggtgtatgcatcctgaaaccctccggacattgcaaggaagatactgttaataaacgcttccgacatctgcttttccggaagtacctgtgccaggcagcctgtgaaatttccctttttcacctgtatcactccaaactctcttgctttcttgatccttctgtattatactgaccgaaaacagatatgtaaaaagtatattttatatattggatatatcattatcatatactaaggagtataaaaggaggcacagatcatgacgctggattactaccgcatcttttactatgttgcacaatatcaaagcttttccaaggctgctgagattctggggaacaaccagccgaatctctcccgctgcatgaatctgcttgagagcgagctcggctgcaaactgcttgtgcgcaccaaccgcggtgtcagcctgacgccggaggggcagcgcctctttgagcatgtcgctatcgccaacgaacagctgatgctgggggagcaggagatattaaaagacaagagtcttgagagcggtcttgtgaccatcggcgcaagcgagacggccctgcgcctgtttcttttgaacaaactggagcttttccaccacaattatccacatgtgcgcctgcagatttccaaccattccacaccgcaggccatccgtgccctgtcgcacggcaccgtcgatttttccgtggtgacgaccccgatcgacatcaaaaaacctcttcacaagacgtcgcttttatcctttcgcgaaatcctgatcggaggttcttcctatgccgctattgcctcccgcatgcagagtctgcacgacctgtcggaggtcccttttatctctctcggagccggaaccggcacgagagaattgtattcccagtattttctaagtcatcatcttgtattttcaccggacatggaagcctccacgaccgatcagattctgcccatggtcgcgcacaatctcggcatcggcttctacccggaagcactcgcctccgaaccgattgcgcgcggggaagtgcttcccatccgtctggtcgaaccgatcccggaacgtgagatctgtctcatccgggacacaagccgtccgaagagcatcgctgccaggaagctgatggaatatctgcagagggatacctgaaacggcgtcgctcaagtgcttttttctggaacaaagtgtgcgccaaacgtatctcccgctccagtcgtctcgatcgtgccttcctgtaaaaatgcaggttgttctgctctgcggctgccgcagtatgcccggcctcccccgcttcccatcgacaacagaatcagaggaatgtagtattcccgccaaagcatgtccactcgcggtcgaaatcctcctcgccagtgaaccaccggatctcgttgtccgatattttcagcacatcgcacacttccatcccgtaagcagtctgtctcttcgtctcttccaatgaccgccagagcggttcccttatgttcggatcaaaggagagcagctgcgccgcaatcagatcgctgctggcaaagattccgtccgtgtccggatgctgcaaaagcagctgttccagcacttcgtggtattccagatgattgtactcataggcatgggttcccaccacctgatactgcacgtttttctgcacacacacttcacagaatcccgccgcacgctcatccgccgacatggcggtctcatgaacgccgctgatatggatcagatgtctgcatccctgggcgatcaggtgttccgccgtcagacggtctcccgtctccatttctgtaagatctaccgggacccagttctctctccactcgcgcggcaggctctgtgccagatatttttcaccatccagccggaccaccgaaagttcccgcggcaatcccatcgctcctgtatacagggtaccgcggtttggcaggcgcagccacggcatcgagatcacacggtcactcacccccgcgtacgtctgcgccgcatacggcagcttcctgagatatgcctcgtttacagtaattacctttaagatacaatcatccgcttcttcaaactgtctcctgccttccagtttttcatattccataaaataatttttatcatcctttatatccgaaacctgacagcaatagtcaattgccagctgctgatataattttcttttatataatccatatccaacacctcactctacgataaactgatcatccacttacgcctcttaaaaataacaagcgatacaaccagcctgaatatttcttcggtggtaagcaatgtgtacacaccaactatgtcccacttaaatacatacgctgcaagcagacacagtgggattccgatgcaccatgtgccaacaatatcaatcaccatgataatctttgtattgccgccgcttcttatgataccgcctccgagtatcatattttcaaccttgaccggtgcatacagggcaaatacaataagcaatatctttccaagttcttttacactgtcatctacacgatacagcccggtatatactccagccagaagaatgagcaatatcgatactgctgccgcaccaattaagcctgcatacattattttcttcgattctgtataagcctcatcatactctttcctgccaagcctcttgccaaccattacaccggcagccgccgacaatccgctaagcgctcctacaataagcccctgtatcggacaggtaagtgtgtatgccgccagatttgccattccaagatgcccatagacggcagactccacattttgtccgaggctccacaaaaattcactgaccagaatcggcataatcatgatcagataatccttgatagtaattttactgaaacgcaatgaccataccggtttatcttcatcctttctgatacataaggcaaatccaaccgcaataaataccagattaaataactgcgaaatcagtgttgcgatcgcagctccctttattcccatacatggcaatccgaattttccaaatatcagcagataattaagacctgtgtttacagcgactgccccaaagctcgcccaaaaaggtattgtggcatgctccctgcagcgcagccacgaagataaaatattgccggccgccattggaatataggagaacgctactatcctgaaatagaccgcaccggtatttacaatactcacatccctcgtgtacagcccaagaatctgcgagggaaaaactcctgctgcaaacaaaaacagcgcagctattaccattccgctaataaggctcacatcaaaactgcaccatgcctcttttgtatcttccgcaccaataaactgtgcgatcagtatccccgcaaccgtactcactgcaccaatcactacagaaaaaatcagcgaaaagtttccacatagtccaactgccgatatgttagtctccactaactgtcctatcataatctggtctacaattgaaaaagatgcctgcagcatactttgcaaggtgacaggaattgctattttacacaatgttttcataaatttcgacattataattcccccgtactttctctcttaattaactcaaccggcaacacaatttttgtctcacattctgctccatcgcgcattgcctcaagacacttaattgcagtttctgccctaagggacgcctcctgatgaattgttgttagagaaggatggctttccctgcttgccatgttgtcatcaaatccgattatctggatatcccttggaatccgaatgttctttccctgcaaaaacctcataaactcaagtgcatagaaatctgataccgcaaaaacagcggtaacatgtttctctaacagcgtctgatatttatcctcataaaaacgcattctctccttttctgtccttggtattttccatcttaatgtttctcccggttcaaaggcttcgataaaaccttcgatgcgctctttatccatgcagatgaaattgtccgctatgcacaacgcttttttatgtccaagctccctaaaatatcttcctgcctgataaccaccgtcataatgattgatgaccaggttgaccaccttggagcatttttcaaaataaccgtcatacactacaaacgatatccgcatctgacttctgagtttctcataatccgcttcacaaaaacccatcagaatcagcccatccatattccacatagatgcaaacaccggaatctcactgatgtcagatgtcgtttttatcatcagaaaatatcctttttcatttacctcatgggagagagcatttattgaagccataacaaatccatcctctaaaaccctgccctcatacttttcattatcattcaccaccactccgatgattcttgaattattcctggcaagcagaatagctgccatattcgggatatatcccgacctctccagctcctgctggacgcgttttaccgtctcatccgaaatcttttctgtttttctgtgaatcacctttgagacagttgcagtactaagacctaatgaatctgcaacatccgcaatccgaactctatcctgtgccatatgtattccttcttttcctatattctgattatatggtacaacagaaatatgtgtgttacaaaggttaagtgcataacccatgacaaaaattgcattcctgcctcttgcatacggttatgaagtatgtccacctcttgcacggtggcgagccgatgaactttctgtaatagaaaaacaccctacattgctgcaaggtgtcgatgttgtatgcatcttttatctctggtgcatatttcataatcatgtctgcaagaaagccacagcagcatccaaaatccttgttcattgccaagcctcccttaaatgcaagaatttcttactattttaccagtgaagtttggactatacggtctttggtcagcaatgcctgatgccgaatttctgacactttttatctccatacctcttttgaaatggaaaccatctgcattttctcaaaaatagaatacgatacaacatcatatcgtaaaaaaagtaaagcatatgccatgttgttttctcctatcttcccaccagctttaagaatttcttatcattcatctgctcattcgtaacatactccccatcacaaaatagcgcataagtcgtaatcggcgttggtacattctgagcatccttcctactttcgatcttcacagccttgaatggaatgccattcttctgagcggtttcttccaagattggtacatactttgcattgaaaggacattggtttgtataataaagaacatagccacgttcatttatatgagggtgttttgcacattccttgaacaccggtggctcagttttctcttcaaatggcagataccataactggattccattatcagcctcatcacaaacttcaaatcctttatattttagaaacttcggatcagccagaaatggctttttccttgctgccgcaagaatacataggccttccttccccttttctctgctgtcctcaatacacttggaaagtaagtcacttgaatatccatgacctttgaaagaaccggacacccacaaacaattaatatacatataaccaggtgcttcgattggattccatgcacactccgcaggtatgtactcaataaagcacttgccgcgttctacgctcttaagaaacacaagaccctcatcaaatctatccgcaagccatgccttctttgatgatacctgaatatctttattgtcggaaatggcacagcaaatgtgctccttttcaagattttctttcgtaactctaatatattccatacctttaagccctccttatcggatgcctgaccacagtcttccatttctcaggtgccactctccgcgcatcactcagataaatctcgtggtgcatcctctgatccgttatatcaagtgtatatccctgttcttccataaatctgtgcattgcatctaccgtagcaggctcatcgtcatacgctccgatatgcatacactgtacacataagccctcctcataggaaaaaaactcaaccttagaaaaatcctgttttttctttgccgtagctttcctgacagcccagtcgaaattctccctggtaacaaaatctggcaagcgaataacagaaatccacttaaaatcttccttacgagcataatcaattccggatacgccgtctcgcctgtcggctcggtcggttcgcagcatggcgtcccccggacgccgctccccctgccaccagaatccctctaatggcggcacgacataatcgaaatatccatcaatctgatgatcttcctttttgctcattttaatcgtaaatgcaattccatacagaagtccgatagcctgcttgtattctccgtctgcatcatttggattgccgcttccccttaccgctatatagttcattttcggaacagttacgatagacggtgtgcctttcggcatataaaattctttatattcttttttataatcaaatgtcattttcctaatcctccatagatttttaatgtttcttccgcattcctgcggataatgtcccgtgcttcttttggttcaagcacctctacttttgctccaaatgtcataagccatgtcacaaggttttccatatccgtatagtctgctgaaaagagcagccttccatcgtctgtttctgtaaagcagttcggtccaaattcttcaaccagccgccacttcatattcggtgtgaaaagagcttttacctttatcccacccggaaatatcttctcatttgacaaatccggcattggtacatctctgcacagaaatccacggtctgtttcaacaacacaatccatacggttcagtttgaacagcctgtaatctttacgttctaaacaccacccccatacataccagctcgaccactggaaaaccagataatatggttctacccttcggttgctctctccggacggagcataatacttaaatcgtatgatgcgcctgttttctattgcactctgtattacctcgatctttggagcaagggaacccttataccatgaagataagtcaatcagcatagagtctcttccactgatgaactctgatgatccggtctggattttctccatcagctgactgtagtatctgcttccgctcacactgtcaagactccgcaaacctgcaagaatcatctgcatatctttggatgtcagtatcgtcctatccatacgatatccgtccataatacttataccgccaccggttccctgtgccgtccttattggaatacctgctttgcaaaggtcttcaatatcccggtttattgtcctgcgggatacctcaaatttttctgccagttcaggagccgttgtcttttcttcctgcagtaagattgacaatatcccaataagcctatctatcttcataattccactctccatacatatcatatctaacacaacacgacatctatatgtcatgtttattatatccacaaaaaaattttctgtaaacaaaaagcctacgaacatcaggttttattcccaatgtccgaagactctatagcattagttaaattttctctttcttataagccgaatcatcctacgattcacttggaatcatctgaaaatatctcagtgcctctacgattgcctcctccacttcatctattttatcatattgggtatctaatcgtctctgcaaatctgaaattttttatcgtaatgaatatctgtaacatccagattagcttcatgaattccctcatatacagggaactccgattgttccactacatgcgtttcattacgggttcccgttttcttttcggttcgcctgcgtccgtatgctatcttccccatatacactgggttatcaataatctttttgataaaacttgatgagaaaccgggaattgttccgttttgacgtaatttctttgtataaccatgattattcaaataattggcaacgccattgattccatcattggtatgaatatatcgttcaaaaatcatttgaataattaccacttcatcctctgcaatgacaagttctccattttccagcttatatccataagatgcaaatccaccgttccattttccttctctggctttttgctcacgtccagccatcgtctgtactcttatgttctcacgttccatctctgctacagcagcaataatagatataagcagtttaccggcttcttttgagctgtcaattccatcttctacacagacaagattcacaccataatcctgcataagctgtaaagagctgagcacatctgctgcatttctgccaaatcgcgataatttaaatacaaggacgaaatcaactccgtccttgccatcttcaatatcattcagcatccgcataaattcctggcggccttttatattcttaccggaatgcccttcatcagaatattctccaacaatctccatatcttgaaattctgcatattttctaagcttgtccttctgtgcatccaggctgtatccatcaacctgaatagccgtagatacacgagcatatatgtaacatcttgtttttttcatctttatcccccaaacttgtcttaataatatgaatctatcgtaatcttggaagcttatcagtactaattgattctagtgtacgaatctgttgcaaagccaattgtcgaagcaattccattctttctttttggtttttcccttgatgaatcaacactgcattatagctttctaaattagccaagattaataattgattcagggttgcaccatctctcatattaccttttatatccggattttcatctttccattgttttgccgttctgccaaatagaaccacatttaacatatcagcttcatttgcatatgtaaaactgatttgtgccggtgtcaattccggtggtatcaatttttctttgattgcatctgtatgtattctataattcagttttgatatttctctgtttagattccaattcaatgaaaaacggctattttcatctgctttcagccttttataatccttgattatataaagtttaaattctgctgaaatccatgatgcaaattcaaacgcaatatctgaatgtgcaaaagtgccaccatatcgtccagatttacttacgattcctattgctccagttgtctctatccattttgtaggtgacattgtaaatgcattagaccctgcctgatttctaaaggagtcgaattcgacccctttaaaattactattatgtagtttttcccataaaccaagaaattctattgtatccttgcttctcatccaatttttgattacatcctttggttcatcacttttataacgcgcaatatcagtcagtgatataaattcattttcaaagtcctgtgtatatattccaatatcaattccattagcatgaattgtgtctttgacaagatttttcacttcatcatcctccacttcaattgtctatttactttccatctcatttttgtcctttaattcgtcataatacgctttatacctgtaaatcgttctctcactgacattattccttcttgcaatctctaccatagtcattccactttcataaccggcaacaaaatcatcgtaaatagccatccattttgcattatgcttctgccttccgcttaatttacgatttttataatattccaattcttcacgtaactcagcgttctcattttccaactcttcaattctttttaatgcttcctcaagtgttataaccttctccacttcattgtttctccgttcatgtcattttcgttttgtctgtattatatattgataatcagtattagtcaatttgattttgtcatgcatgaacacttttcatattcatcatgtgaataaaataccgctgataccttttgcaagctatgtctttccatagactctctgcctgaatattcctaatccactcgtttagattccattttcgttttaaagccggtccatattttagaatcaaggatgttattacatctgcacatctttcaaaggctgcattctcttttgcatcttcataatacttctttctcattgttgctcccctttccgaacataatttgttttggcaaccagtttgaattatctgctttgcgcaaatcataaacctaaatcttatttggtcttcccaatccctggtgtcttcggtaaatcaagccatgctcctccagctccttcaacattttgttaaccttcttattccccaggttcatcaggttcataatttcttcgattgtaaaaatgatataggtaattccatatttatcacgccatgcgtctccattggagtctgacaggcacttgtgatccagcagtattccatataatacttagtaaaatcgaacatcctttttgtaaatgtgtgttgttttcaatgttttctgccatagacggtcattcctcctttctcggtcatactcaagactcctactgattcggtccttcacctctcggctactatgacctctgctgacttctgtgcgttcagcattgctttatgcaatggttacctctttcaaagcgtaccgcacagacctccctaggtaccacacgtttcttcctctccatccatctgcctcatttatcatgcatgattccgtgtagttattgcgcttcgatttgatatgcaaccttaccttcatgcataacctcatataagatttctgtccgtcagaccagagatttgcccatgagttagtatgttcctcccatccagcttccttcagattccatctcacgatggacacccttgctttcggctatatccttcccactaccgggcggatttgggactttaacccgttagaaacgtgcgccgctaggcgcacatagtgaaagtgggggcactttctgcccccactcaggaaatgttgctaaaatactgtttagatttatcatacatacaaaatggaagttatctatttctcctcttcgttaagacctagttcattacatattacttgctatccctgataccttattctttcaaccagcgtttcctttttcagattactgcttaaaacgcaggaaagtacaatctgcaacagaccgaccaaaaaaatcataataaaaattggtacgattggaacatgatagatattcattccaaatattccattatgttttgcataggaaaaaagtgtatagccgagcggcagaccaatgatcaaagctacgcatatggtaccaaccgtaaacatcagtccctgtaactgcaggcataaatttaattgtttatttgtcatacccacagcctgtaatataccatattcctgcttttttgtcgtaatattcatgatcatggtattcgccatattcataaacccgatgagtcctataatagccataaacagataacagccaagcttcatcatgctgcttgcaaattcggcagattgtaactgcgcatgataagtatccatttttatatgcgaagtattagaaatcaaagtattcagactttgttctacagatgccacatcttttttatcacagtccacccacagatagccataggctgttcctctcggattcatggaacgatatacaccttccggaatgacaagataagtgtccgcacttacaaaagatcctgcaatctttccctgataggtataggttccacttccattctcaaagtcaaatgcaatggattcacccggagcatatccatcttgttccatccacgttgaccagccaaagaaaatatcaccattctttaccgcctgatcatagtccatagagccaatatccccgtcctggcgcataaaatcaaaatcctttttactcacaatagtagctggaaatcttgttccgttcagatttacagagacaatctctctcgtcatgacatctgtcactcccggaatgcttttgatttcttcaatcagcgaatcattcaatggatcatccgtcagaatcgtatccagattattctccggatatctttcatcatactcagcagaatagtcaagctgcagttcaaattgtccatgattaacggaaagacgtgcttcatgttccgtgtcaatatttcccacataattagagataatcacaaacaatacgcaagaaaaacccattgtgaggatagtaccaatagttcttttgggattacccgttacatttgccattgccatagaaaacacggtgacattttttctgccatttcgttttccttttttttgtgtttctgcattttctaaataccgtgttgcttcgataggtgaaatccgtgaaacaattttcattggtttacgcagtgccaaagcaacggtaaaaaatgacacgaaaatacagagaagcataacaggcagggaaaacagaggcacctgctgattttgaactcccatagagccagttccggttgatacaaggttcccctgttctaccagccagttaaaaccgcattttgcaatcagaaagccaaaaagcaatccaactggtattgaaaaaaatgtcaaaaaaatgccctctctgaagatcagttgtttcatctgcttttttgtcgctcccagagccttgatttttccatactcctgtatcttgttggcaataccgacctgaaaaatattataaatgaccacaacagcgaaaagtacaattgcaagaatcaaaaccccgcataccgcaatcgtttcataactcggctgcaagacccattgcaaatagagatcattgactataacgtttttttcttcgatcccacaagctgctgcaatctgctttataaccgaatcaatattattcatagatacatttgcagaatcatttaaagtaaaataaatattatactgtctgtcattctctgcgacgtgctcatcataaaactcctgtgacccgaaagcaacataagatgcctcgatggtatactcatcccgatcatataggattccgctgacaacaaattcttccggcttatattctgactgcatccctgcgcggtaatccagtgtaaccgtatctccgatctttacatcaccataccccattgcacgaaaaaatgcttctcctgcggcaatttcctgcattttttccggatactttccttccttcaactcatattctttattataaggaagcatttttcttgcagtctcatccatgcagacaaacccgcctttttcattgccttttatgataccttcggtgcacatagtgcctgtagcatctatttccgcacggcggtttacttcttttaactgcgatccgtctgcggaaacaaacagaccataattgcttccatatgatcctgtcgcctgacttttctgtaaatgaattaccccatttcccacagtactgatgataacaagcagcatcgtggtcagacagattgccatcatgatcagtatacttcttgtcctgttccttttgtcattgctatatgcaatcctgcttattgtcttcatctaaaatccaccacctgtccatcctcaatcaccagaatacggtcagcgacctgtgcaatttcgtcatcatgggtaatcattacaattgtctgtccatatttttttgctgtcatcttaagcagagcgattacctcatcactggtcttagaatcaagatttcctgtcggctcatctgcaaatataatttccggacgattcaccagtgctcttgcaattgctactctctgctgctgtcctccggataactgatttggcagattataaatccggttttcaatccccagagttgcaatgatatcatttacatacgcttcatccacttttcttccatccagccccagtggcagtacaatattttcccagacattaacagatgaaaccagattaaatgcctgaaaaacaaatccgatttttcttctgcggaaaacagcaagggcatcttccttcatcctgtataaatctttcccggctaaagtaacactgccttttgtcggggtgtctagccctccaagcatatgaagtaatgtacttttaccggaacctgactttccaacaattgcgacaaattctccctgctcaatctgaatgtccacctgattgaccgctttaacctgattctcacctgcgccataaaacttacaaagctgcttggtttctaatatcacactcatgtgttgcctccttttcaattctgtaaagcgtaccttttcaacctacatccaaattgtatcaggataatctttcatttcactttcaaaaaacgagcagaagtcttacagaattgtaagatttctgcccatttaaaatttaaccaacatatggtaattgaatcacaaacgtgcttccttttttctttttgccggaggttaccatgattgtacctccgtgtttttcgataatttctctcgatagaaaaagtccgattcctgtaccactcttttccatgaccttcctggaacttcctctgtaaaatcgttgaaaaattttgtgatactcattctgcggaataccaattccctgatcctcaatttccattcttacaagatcgtttcttttttgtaaccggataaatatttttgaaccatccgggctgtacttgattgcattatccagaacgttgatcacagcttcaccaagccaccttttatcctgcataaccatgcatgtttccagctcttttgcatagtcaaaaacgaattcaatttctttctcatccgcttttggataagtacagttcacagcagatatgacagtatccataagcggaagttttttcttattaatctgaatcagtccagtttccatcttggatatttcaagaagcgactgcaataatgtctccagtccatccagagcactccgacaacggatacgaaactcctcctgttctgtggcacttaagtcattctgcatcagcacactaaaacatgtatccaaagctgcaaccggtgtctttaactggtgagagatatcagaaaccatttctttcgtgctctccttttctgcccttgcttcttcctttagcaactgaatatgatgtccgattgcttcaagctggtcattcaatttttccagttctgctggattttccgttttcagtaaagcatcaaatttattttcacggaatctgatcagaatttcttccaactggtctaaaattttctgatgacacgcatcttcttttttcttccaataaagtaaaaaagtcaaaagaagcacgcatatcacagtgcttacagcaccggtcaccataacctgatgccggaattgcatataaaatgcattccctttatttccccagtatccatattgctccaataaccgccttccctgttcgttagtttcaatatccttatccttaagcaattccgaaacagcatccagcccggaaaattcttcctttgcagcaatctttgtcataagattcattttatatttataatcttcataaaacacatacgtggtaaagcaatttaatattgcaaacactaatatgaccggcaatgccaaagacaaggctgatgtgagtttcctgtgatatctctttgtcactgccttacctcctgattccatatatacccaagacctctgatattctttatatagaccggtgcagccggattgtcttcaattttctcacggagtcttctgatattgacagcgattgtattttcatccacaaaatccccttccagatcaaacacattttccaatatttgtgtttttgaaagaatctttttcggattctgaagaaaaaaagtcagcattttcaactccgtttttgtcagactgatttcacgactctttatctggactttcatttctcctgcgataaatacgatatctcccgaaatcatctttccagcttccgttttctcctgtctgcgacggaaatatgcttctattttcaaaagaagtaccgaaagactaaacggcttggtaatataatcatccgcccctgcttcatatcccataacctgatccatctcctgatctagtgctgtaaggcaaataatgtatgtattataattgcatcttatccaccttacaaattccagtccattcccatccggaagattcacatcacaaatggtaacatccacattattatcacttgcaattcttttcgcttttttcactgattctgctgaaaaaacctcatatccggattttttcagtgagaatgtaattccacgatttaaattttcatcatcttcaaccacgagtatacctggcatagcatctgcacctctctttattaactattcatcttaaaatgcttcaatgcctccacaattgcactctctttatcttctggacactgcggttgcctgctatcttcatttttaggtaaattataattctttccaacctcaattccgcattttctctttacctgtgagatatacagattggaaaccttcatgccggcattatgttcagccacatacttctttatctcatcatatgtagccttagtctctgcagatgttatatccatatcatcaagttcaatcgtgacattaatgtaatcatccgacttttgtttcagttggggcaaaagaacaaccgtctcaagtgttgatagcttttccaaggaaaccatatgctcatccgatttctctttgtccaaagaaattcccttgatttgtgctacttccttgccttctttaataatcggtactggaaactgaaacttaatattctgaatccaattactatcttcccgtctttccgggaatatatcaattcgttcaataaatgcctgcataaactgtttcttttcagcatccgtacattctgaatacacttcattaaaagcacctaaaaatctgtatatgctatctgcatcaatctgatttttcttaagctcataaatctgagacttcagttctgccattgtttcttccacttcatctattctatcatattgagcatccaatcgtctctgtaaatctgatatttttttatcgtaatgagtgtccgtaacatccagattatccatctgctgttcaaggcgggtttttattgtcttcgcctgatgaagacttgcatttaacacagataactgtttttccagatccgttgtatcaactgtagctccaatcttatcctgaatggcatccttaaattttccttcttttgtcattgctgtaatcagctttgcaagcatatcatcaatctgtgactgctcgatattgcgtcggaaagtacacttgtgcccggtagcattcacgttattcttgcaataatagtaatatctggtcttgttatcttttctccctgctttagcaatatttccatacatttcttttccacagcaaggacattttaatattccagacaaaatatgtgcatgttccggatcatgaattttttcacgcctgtaattattttttgaacgcttttcctgtgcaagctcccagtcttcctcggcaataattgctacatgaactccctcataaacagggaaatctgattgctccaccacatgcgtttcattacgggttcctgttttcttctctgtacgcctgcgtccatatgctatcttccccatatataccagattatcaattatcttcttgataaagctggacgagaagcccggtattgttccattctgacgcagcttctttgtatatccatgattgttcagataatttgccacgccattgattccatcattggtatgaatatacctgtcaaaaatcatttgaataatttccacttcatcctctgcaatgacaagttcaccattttccaacctatatccataaggagcaaatccaccattccatttaccttctctcgccttctgctcacgcccagccattgtctgtactctgatatttccctctccatctctgctactaccgcaataatagatataagcagtttgccggcttcttttgaactgtcaattccatcttctacacaaattagattcacccataatcctgcataagctgtaaagagctgagtacatccgccacatttctgccaaatcgggataatttaaatacaaggacgaaatcaactccgtccttgccatcttcaatatcattcagcatccgcataaattcctgacgaccttttatattcttaccggaatgcccttcatcggaatattctcccacaatctccatatcctgaaattcagcatatttcctaagcttgtccttctgtgcatccaagctgtaaccatcaacctgaattactgttgatacacgagtatatatgtaacattttgtattctttttcaatacgttcactcccctctagtgtggtaaaatcaaagttggatttttcaacagtgtggcaataaccggggcatatttagatattccataatcttcaacaatactggttattctagcgcctgcatcctttgatgaagccccgcataagaaaaccctttcatcagcagttccataatccaacactataaatcgatcatgaaatataccgcctgtctttttcattgatatttttacggatggatattccttgcaaaaatccgtaaattctatattatgaagtttattatttccaacattatcgctgaataaagtaatatttactcctgtaggagaatttttaagatgtaccagcgttcttaatccaatataattgtcaacgacatatattgacgactttgcctgcttgtaaatggactcatatacctcatctgcactactaaattttgcattaaacatgagccacttttcatcatcatctgaaacaaagctgttcatcatatcagccaactcagattttgtcacaacatccttcaagccttctgcaacatctgaaatctgcttttcaagagatatcatatctgagttgattttgttaatttctattctgttgttagcagtttccatgcttaactgaagtatttccctctgacctattaaatcacgattttctaatatgtaatctttcattttcttaaaggttcttattaatgccttgctctgcttaacagccaacggtcctttcaagacagtcatcagcatatataatccttgctctgtaaatacatgaggattataacgactttttgaacttatatttgcggtacaatttttgtaccgcaaatcttctaattcctcatctgtcaattcaaacataaaatcttcatcaaatttttcaatattattttttacctgtctattaaatcccttcgtatcatagccatatatctctgctaaatcagcatcaagcaatacccttttacccctaattttatacagtttttcttttagatattcttctgttacttctattactgcaacatctatttctttctttttatcttctgccatagaattcctccatccattttgcggtcaaaaaaattgtccgcaactctcatataacatattgctgacatcagcaaaatggtctattcttcttttttcttcattttgtcataatacgctttatacctataaatcgtccgctcactgacattgttcctcttcgcaatttctaccattgtcatgccgctctcatacccaacaacaaaatcattataaattgccatccacttggcgttatgtttctgccgaccgcttaatttacgatttctgtaatactccaattcctcccgaagttctgcattctctttttccaactccttaattctttttaatgcctcttcaagtgttacagatttctccattaccctgtcctccgttcatgtcattttcattttgtctatattataaatatctatgtcactttagtcaatccgattatgtcatgttgtgtcattttttacaaaagctttcatacaatcgaaataccgctgatatcgtttacaggctaaacttctccaatagcagtcagcctgtgtgttttttatccaatcacgtaaaatccattttctttttattgccggtccatattttaagatcagcaccgtcacaacatctacacatctctcaaatgctgcattctcttttgcatcatcataatatctctttctcatttgtccgctcctttctgtgcttaaattgctttggcagccaattatcgttatctgctttcaacaagtcatacacatatatcttattcggctttcctaatccctgatggcttcgataaatcagattatatacctccagttccttcagcatcttgttaattttcttatttcccagatgcaacagcttcatcatttctttgattgtaaaaatgataaatatagctccatattcatctctccatgcatcaccattacactctgataagcagcgccgatccaacaaaatcatataaagtgtctttgcctcattcgtcatgcttctaaattgatcttctttaaataatcgtttcggtaatctgtaaaacttatcatcatattttgtattttccatttttcctgatcctccatatactttaaggttctttcgtcattaacagccttttgtgctcaattcttgcttaaaattcaactctcgcaacataaatatcgctaattggcaagcagtgcatttgtgcgtacaaaatgcctttttagcttgttggggaaatgccccaatcccctaaaaccatgaaaataaattttcatggagctacgcctatcggctttgtcatactgatgtgtttccgacatttcataaattcttcactccttcccttcccgatttatgaatttattttctcagattttctatgccgattcggtatatccaagatgctggaaaaattttctttttgtgattttttctaatattatggacaagacaggtaaagaattgctctttatctcatagcaatatcatgataatctatttgtatctttataaatgaggaacatactatgcatacaaaacttaccataccagaaagactgaaagatttgagagtctcagaaaaaagaatgtcgttacaggagttatccgatgccaccggtattcccagctccacgcttggcaattatgaaaaggatgaaaatatagatatgtcactcagcaatcttataacgcttgctaatttttacaacgtaagcacagattaccttctttgccggacagaattacggaaacataaaaatcagtcagcatctgatctgcacctgaatgacgatgccgtccaaatattgactgacgaaaaatataatccaagattattatctgaattgctcacacatgaaaattttaggaaattcatgactgacttggaaatctatattgatggatttaacgataagggagttcaaatagcaaatgcttttcttgatgtgatgagatgcaaattaacagagcttggggccgattccaccgatacatttgcaagtgtatttgataattcacacattgagtcagagcaatattatatgaatattctgtcggcagacttaaagccaattgtctctgacctaagaaatgctcatatgaaagatagcaataccgctagcgacattgactatcgaagcatagtcaaaaatatcattgatgactttacatctcaaatacatactaccgcagatgacgatacagagtcatcaaatgatgcttatataaacggtcttttacttcttttctgcaaaaatctagagatgaaagtccctcagctttctatggaagaaaagcgaatattaaaagaaatattttcccgttctaagcctgcaaaggagcatcggaagctgaggcgaaggaatcccaagttataaactacttaccaaaaacaaggcatttcacctcaattaggtaatctgccttgttttctatgattcttaaatatatacacatcttatttgcccttatcttaatggacaatctgatttcttcactttgtttgcaagttttagcaacccattatttttacaataaaactgcaaatctcttacggtttgttttgatgtaggtccaataacgatagagtcgaataaatcttcaaagtctattccttctttttcacacaattctattaaattcaaaatatagacccgtctaatagtattaagtattttacattgaagatgcttatcattttcattaacaaaaagtggagaaatccttatttcttgctccgtcgaaaaactttcatgcttatgaagcattgcacataacaacaaattatcaatcaaaccgtttaaatttgaaaaatcgtccatcttatcatattgaatataatctcgtaacagttctttcattttatgttgcttggcacaataaccataatattcttcattcataatgatctgattgtaaaaaataagcttaaataacgttgctgtattaaatacaattgctactccttgtccaccacatgcatacctatcccattgtgctgcatcattacgtgctttggatacgcaaaatatatatggatattctttttgcaatctatctttgatttgcccaaaaacatcattggctttttccttattagctgaatcaatgcatgcatatacctctttttccagatcgtttataaaccctattaattcttctcgatcattcatatgttctgcactgccaaaccaaatctcttttttgccaataatcccacataatgcatttatatctgtataatgccatagtgtttttccatacttttttaccgcccttttcactcgttcttccatatagtcatctcttcccatagaattttttgtcttgtaatttactacttttgtatcaaacaatggattgagctgttcatcctcatatcgatcttgtaaatccatttcatggtcgtacacatcaagcatgatggtcggttcaagtgaaaggtctttaccgacctctagtttatgatgaacgatgcacttcttctcatcgtcccagcgttcgtagcagtaatattttccatctgctgtaaaataacagccacggttaggattaaacccactcttgcgcttctttgtttcattgttcttcattgcagtgtcctttccgtccgagtggaggacgatgggacacaaaaagaggctacggtcgaagacgaaccaccgtctctggtttgccgaaataggcgcacgaaaacaacggtggatgcatcttcgcttcaaacgcagctgttattgctgtgtttggaactcttatgcattccatcgtccttatagcgctattcggactaaacgagatttgttttattgattacatttgaaagttaccacatttgctttttttgcccgttgtagaaagttctacggaaaaatgatgtaaaaaggctctgcggagtctaattactccgcaaagccctataaattggcattagactgttgaagaaagttctacaaaaaaattttaaaaacaaaaatagaccggatttctccagtctacttttgttcttatctattatcattatttgatgggtggttgatgtatcaaatgttcataatgaatcgccaccaattccgcataagtatcagaataatcctctgcccaatacagatgcagtatttggtcatatatggtattctcttcacctttagctcccggaagcgtcaagtccaatggtctctccgctaactgcaacaatctattgcttaacctgaacggaatatgaattcccaagcaacaggaaacgacattctcttttgtgagattctttcctttcttcatattactgacagtcgtattatcaagtccggttaccgacttaagcgttcgaaacgatacattacaaatcttcttatccatcaacgtcgcaagtgcttctccgaattccatgccatttatcgcagcaagcatctctcgcgcaatctcgttcacaagaccaaggctcaatttctcatcatccgacaatgccgaaagctcatcataataattgaaggtcttgcttgccatagaactcggcagggtaatgtagtggagctcacccgtctctttatccattacaaactgcaggaagcactcttcctcatgtgctttggcatactccgtaaaaaacagttttcccttatcatctcgttccagatatttcttatcataaacacagagcttattatccacatatgcgaaacaatcggtatccaccatgcaggcaagggccttgctctccgaataccattctttgagctttgcttttttgacggatgttgtgatagttttcccttccatcacttcatctgtcagcacaactcccaccggtttcgaattactgtcggtgtccatagataccgtttcgactttcgtcttatgcttcctgtcaaattcattctcaggatatggatcctgcccgcccgaaagaagaaaataccgcaaataagcatccactaacattgcaagccttgattggcggaaattctggtgctccacaacaataaaaaattctgttgccttactattatccacgctcgccttcagttcatcaaatttaccatgtgcctctatggtttccttcgtgactttctttgccagcatttcgcgcaagagcctctcatagcatcccagtctgcgcaccacccgcttgatccttgcgttttcagcccccttcatcaggtcagatatatactcgcgaaaagacttacccggaatgattcttgcattaccggcttgcacatcatgaaggaaaacatttgcatacttttgttcctctgttgacagcatagaaaacgacttatgcaaatcagtcaacgtcttgtccagtgtttcttgatcatacttgccctgaatcagcttgaggaacttttcaaaacgagtattcatatactcggcatcaatttttgtcgtgtcatactccgtgatatgaatttttacatcatacgggacatccccgccgtgacctccaccaccccctcctgccatctccttatatcttgctaacaggatcagatacgtcatttcatcgaatagcatctcgatatccgttccgtcttcagcagaatacactcgctgtttccagttgaagccctgtatcttagctgcctgaagataggtgtcgaattgattgaacgccttggcaaactttcgtttctcagactgttcctctggtagcttctcaaagttgttaatggcaccagcatcaaatatttccttaatctcttcaaatgtcctattaagattacgcaaattccttggcaacttgtccacgaataaccctgtagggacattgccggaataagcctctaccgccgcttcgatgtttttttccatcgtattcggccttcgataatattttatgataccaaaaggcttctctgattcgttgaacagtcgattggttctcgaaaatgcctggattaagttttcatactccatcaccttatccagataaatagtatttacccactttgaatcaaaaccggtcagcatctgatttacaacgattaaaatatctatttgctgattcggctccaatctttcatacggtttcttatgtgcaagtctcaggctcacatccttcctgaacttgtcatacgtcggtattgtaaatgtctggcccaatcgatcccgataatcttccaacatatccacgataccgtcttccttatccaaagatccggtacctctttcgttatcgatagtaggatcaaacattgccgttatcataagctcaggtatttcttttttcataagccgccaatatcgtaccgcttctggaatactggatgtcgcaaatatcgcatggaacttaccaccacgactgtatataagccatttcttcttaatatccgaaataatccccatgacgtactcatccgtctggtactgctcattcgggatgaaatcctctatgccttttacccacttatcaccaaccttcttcccatacattttcacctgggaggagtccatccatttgtagaagaccttctttttcttttcatccttcataacatcttctactgtatcagccttagctttttccaaggccaccttctggcggagctcatcatcgtcatatatcttgaccatataaggatcaaagccaaggacattcttatctcggatgccatccgcaagtgtatatctatggatttcgctgccgaatatggttgtggtcgtgctgtcttttttgatattgacgtcctgaatcggcgtaccagtgaatccaaaaataatagaatgtttgaaggtatcctttatcgtcgttaacatgtcaccgaaagtagatcggtggcattcgtcaatgattatgaccagcctcttagatctgatctttttaagatctgcatcctttaacccctccatatcctctgaaatattgctgagtttttggatggatgtaacaataagcgtattatcatgatcatcgctttttagctttgatatcagaatatctgtattttccgtagcttgtatgctctcggtttctgtagcaaatgacctgtactctttgagcgactggatacccagttctttcctgtccacaaggaatataactttatccgcatcatgggaactggcaatcaactgagcagatttgaaacttgtcatcgtctttccgctacctgttgtatgccatacatgaccgccccgctgtgtctccggcgtgtcctctttccagtttctcttcgtcacccgatcagcgataccgattgcagcataatactgataacttctcataaccttaagcagattatcatctgtatcagcaatcgtataaaatccgatcagcatatgtgccataggaatattcagaagtcctgccgtaaccttgtcccattcattgattggcacgttgtcaaagtctgcccaatgaaaaaagaacgccggattaaaaacaccatcctctcccggatttgcgaaatatacagcctcttccggctccatcgcaacaaatacctgaatcagagaaaaaatgccccggaacacaccctcatgcgaatactttatgatctggttatacgcatcactcacaggaatattgcttctctttagttcgatatgaatgactggcataccgttgatcaagagcattagatcccctcgtctatcattcaatatcggagactttgtgttgaaatgtggctgctgtacaatctggtatctactttcgccgtaggcaatttcctgacggtcatatatcttcagactgacttccttcccaaagtgcagctcatcatccggattgtctctgataacagacacgctccgaccattgataaagctattcagcttcaacggagtacgcaaattgatgatctgctccatgatctgctgcatctcgccatccgtcaacggacattcattcaagcagtttcgctgcctattattattgaacagaatatccgcccagtttttaagcagatccgcctccgatggatgacggattacttccgattcccagccacgctctatcaagacgcctatgacggcttcttcaaaatcgctctctttatcaaaaatcacgtccggcacctccttctacacaaacattttctccatgcacgcactctttatatgctttatcttctccagcttttccttctcaatctcgataagtcgatccatctgacggaaatattcaccgatttgctgttgttcctctattgtcggcgcaatataggccctcttttccagaaatgctttcggcttcaatgtcctgagcttcttgactgtgccctccatactccgtgatatttccttgatgaagcgcggatgtcttacgatacactccataaaggtcgaatcctgatctgtgtaaaaaatcttgtatatcggagatacacagcccttgcccagagcgttccgatgaatggctccataaatcacatttgccgggttatagatgatgtcatcatattccgtctgtaaatactttttatttgccttgtcgataataaggaaatctcgcttgttagtcttcttatcctccggtctgattacgccttcttcgatggtaaacgccaattgcggatactcatcggatatcgtatcaatgatatgccgctccttaaagatttcagaaaactggcagagtctccacggttctttatactggccaaatctgacggcaggaacatctgcgccgttctgtggaaacattttctcgagcatagctttgcgcaagcactctaatcgtttaatttccttgttatgcagcgaaataaatagatctatatttctgaaccaacatccgattcgctcttgttccgagtagttaaccggataatgaatcttaatatctgccaggtcatttgcattgatagccggatagcttgtacctgtacagttatctaatacctttttaacaaaactattgttttgaacaagactgagcagaaaatacccatctgctgcaaaaggacgaatttgtgcatatcccgttgaaaacacatagcattcctctttttcaaacaagtaattatttttctgatatggtctaactgtttgatagaataaatccccatattgcgccactcgttgagctcgcgatggagcagtatctcttttctccttacgatgatacatcatttcagtcccgactacagattccagatccacatactcgaactcttcaggcggttctgttttaggattaaaaatcgccagttttctaagattgttgtaaatccaatcgtcctcaaatccctccatcctgatttcggggctttgtctattttctttcatcacacttgtcctcccaaaatcagtttaaattcttgaagtccttccttgtcagatccgtttgcagctaatgagccaataaggctggctagactattttttatagatatattctcattttgaagatcatgcatagtagtggcatatttctccgccagatattccatcttcccaataacatcaattattatggcagatgaaatatcttccaaatctttcactaacggcgcgatccatttctgctccactattttcagtgcctcttcctcagagagtccttctatgacctcttttgttttaatatgaaggttttcctttttctgcttcatatccttcttaacagagctttcctcgtccattagcctaagtgccgacaataatttaccatctaatgattcttcagggaactcaaattccattttaagctgctgaatcctgcttgtcagagaaggttttttacagcttccgtctttgtttttctctatatggttccagtctgcatcactacacgatttcataaaagtgagtgcttccttctttgacagcgacatatatttgtttaacgcatttatctcatcgctttccacttcctgaagaatctcatcacaggctgattttaattccttggaaacaaacgcatcattactgtcatttaagaaactgccctgtttttcatcctcatcgagggaatcaataatctccatatactcctcggcaatctctgacaagcgttcttccaaaacccgtattgcttcaatctcatccggcatgagtatttcttgtacaagttcaaatggcaagatatgccccttccatccatcctgtacttccgtcacttcatcatcgtcatcattcttgttgtttttcttgattaccatattcggatctacctgagtaatgacctggaacccttctgtctgaagcatctctatatccgcagagataatatcccagtatttcgcaaacacctgataggcaacatatcgatccgccaacttaacccgatcaatcctgccaaaaatatcttcagtaatcttttctttctcctgttcagctgaaacatccagtatgccgtcgatcaagtcttccttaagcgtctcataaaagccgacgaatgcttttgtaaatgtaaccctgtatgcttcaactgactcaaaagaatctattgtacccttgatatcctttgtccttggctgaagatatcccgcagacacctctttaaataatgcatctctaagtcctggaaacgcctcccagtatttctcaaatgcatcgacctcacttaccggaataccaccaaacatcgttgcgcggatatcccatttctccggatcatccgtagaatcaacatacctggtgatatttaggttatactcattttcctttacagtttcttttgaaaccaatacggaatatttatcaatctccgttctgtattttacggtatctactatcttcttaatatcagaagccctaagcttgttattcttcccggatttttcaaaacccttggacgcatcaatgataagaacgtctgaactcggtctattttttttcaagaccataatgattgtcgcaatattggttccaaaaaatatgttctccggtaatccgataattgcatcaatacggtttttctcgatcaggttctcgcggatttttgcctcttcaccgccacgaaaaagtacaccatgaggaaggacgatggtcatgataccgtcatcttccaggtgatagagatcatggagcaagaatgcaaaatccgccttggcctttggtgcaacgccgaaatccttatatcttggatcgaactctttgtccttcggatcccacttctgtgaataaggaggattgctgaccacggcatccaccctcacaagcttataagtagtctctttcttgttctcttcaaagaaaggccagtcgtcctccagcgtatctccgtttctcacattgatattggcaggcttgattcctctcatgactaaattcatcctggtcaggttgaatgtattctctttcagttcctgcgcgtaataatcaatctttccatcaccgctaatatattttgcagccgatctgccgatgtttattaatagcgacccagaaccagatgtaggatcatatattttgatctgcttcctatctttaaggtgctctgccacgatctcggacatcagcacagatacctcatgcggtgtatagaactctcccgctttctttccagcatttgctgcaaaattgctgatcagatactcatagatgaagccaagaacatcgtaatcctgcttgccatccatcggaatcttcttgatcagcttcaggagcttcttcaccgcctttgtctgcgagccggaggtctctcccaacttcgacaaaccagtctgaagagtattgaagattttctcaaataccttcttgtaaacctcatcaatattttgatcgaagtcggacagtgcatccctgacatccttcacatcaaaatcatttccctttgccaaccatgttgagaacagattgtcataggcaataaaatacccaagtgtctcccgcacgtgtttcgcatacttgacgtccttttcgtcaaccttcttgatttcatcttcactgagcttttccttttgaaacagatccagctcacgctccgacaaatatttgtagaagatgaagccaaggatgaaatccttatactcattagcctctatctttgaccgcatctgattagctgattcccaaatcgttgatgcaagttgatgtttattcattatgttttcctcctgtagtgcctatattttataagcattatttatcggcagctctaccactacgtgcccattcctcaagttctgaatacttaaatttccacgccttgccgatcttcattcttggaatatctttgcccttacgaatccagtcgcgaattgtggctggcttaacccccaggaattctgctgcttcttttgtacctacccagttttcttcttttacattcacagtcatagtctcctcgctcctttaaggcatcattgtccatattcaattatatcttagctgttgtcatttttcaatggtttataatattttatatctgtttgcgtggttacatttcaaagcacagttttcttgtttcataccttgattttccagtagttagagtcactttcacagacttcaaaaatgaattccagcagatgctcctcaaagaccagatcgaactttttctgctcggtaagcttcccacctccatcgtaattcgctgtctaaccgtctcatcatcaatttattttattaaatcttgtagtaatgccacagttatttacctcgttctttcgtttatgtttatgtttttgcttttatattgtagcttataccgcatttttcataaaaggtgataacttcctctgcccattataaaaatgcttattctccttgtgaagactgttgcagagaagccaccagtcactctcccattgcaattgcgtatttatcaatcttttctatcagtaaattgaataatttatcgctatctgttacaaaaagtatatcttgaaaaagcaaattcttcaatcttagtaattatcccatccatccttatctttagattagataagataagtataattttaataagtcttaataccctcagtatcattacattgtcctttagacactccaaggcagccaaaaaagacatcccctgacctgtaaaatctacagttctggaatgtcctttttcccatactttactatatttttaacacatgatgctgcttatccacaatctatatgattccaaaatgtctaaacgcctgcataattgcatcttccttctctggtgtacactgtggctgtctcgtgttctctgatttagccagattaaaattctcaccgacatctagtccacacttcttcttaatctgtgcgatatacagtgaagaaaccttaagtcctgtctcctccagtacatatgtctttatctactcataagttgcttttcccttgaattcagataaatccatatcctccagggagaagtccaccttcacttttctgctgtcggccattctccgttccactttgctcagtgcccttggaaagtaagacaaccgtctctacatgtgtcgtgtgcccaaactgatccaccggacgcactttccgaagtgcatagccgcccccgcacaggatcttcagatctcttgcaagcgttgccggatcgcagctgacatacacgatgcggtccggttccatacgaagcatcgtctccaggcacttctcatcgcatcccttccggggcggatcgacaacgatcacatccggatgaagcatgtccgcatctggcttccggctctccttttcatagaactcaggaagaacctcctccgcttttcccacgaaaaaggaggcgttggtaataccgtttaataccgcattgctcttagcgtcttcgattgcctgcggcacgatctccacgccgtagaccttccccgccttctgtgccagaaacagcgagatcgtcccgattccacagtatagatcccagacggtctccctgccagtcagacccgcgtaggaaagtgccagactgtacaacttctccgtctgcactgggtttacctggtaaaaagactgcggggaaatgtgataggcgattgccgtatctgtcagtgcaaaatcatggtcacagtcgcgcagatgaatctgatccgtgatataatccgatccccagacggtccgggtctcctcccccaaaatcacattcgtattcttccggttgatgttcacggaaatgctggtcataccttctattttacacaacgcatccaccagtttcttctcctgcggaagtgtctctccgttaatgaccaggcagaccatcagttcctttgaggtgaatccgtaacggatcagcacatggcgcaccagtcccttcccagtcgtctcatcataagggcggacgccgttctcacgcatataggaaagcaccgttccaaggatctgttcattctgcgtaacgcccagtttacaatcctccactgggataatgctgtgcgtgcgcgctgcgtaaaatcccgccaccggcatcccgtccctgtccgcgccgatcggaaactgtgccttattgcggtaacgatacggctgctccatccccacaatctcctccatcacggaatcaatgagttccggcgcaaatcctccgatgcggatcagattgccacgcacctttttctgcttatagcaaagctgctgcctatagtccatcgcctggatctggcagccaccacagcgcgcatatagcggacactccggctgcacacggtacggcgacggttctaaaatctcctgcaccctggcatagccgtagttcttcttgagcttcgtgatgccggcacggatcgtatccccgatcacagcatctttcacgaaaaaggtcatcccctcgtattttccgatgccctctccgtcaacgcccatatcttcgatctttaactcaatactgtcgtttttcttcatatcctgtgatatacctatgactctcttcctgatctgcggatattgctctccagcaggcggttatatccctgccactccagattgttctccggaacacttgcaaaaatctcccgtattgtctccatcttggcgtcaatattgtccgcaaaactgagtgccagtgcctccgcaagtgccggtttcttcggcgaaccgtattccagttctccgtgatgcgctaaaatgcagtgcttcaactcattggcagttcccttagggaatcccggaatcgtgcggatccgctctccgaccatctcggcgccgatcatgatatgccctaaaagctgtccctcatccgtgtaatcgttctccgggaacgtcgagagttcctccagctttccgatatcatggaaaattgccgcagacacgatcagatcgcggtttaagatcggataagtttccgcaaaataatcacagttctttgtcacagagagcgtatgctccagcagtccgcccacaaatccgtgatgcacgctctttgctgcggaatggaacttgaaccgtttttcaaaatccttatcttcgacaaaaaagctctccagaagcttttttaaatacggatgcttcacggaagcaatcagtcccagaagctctgtatacatctcgtcgatgtcctttttggataccggcagataatccttcggatcgtattccccttcctgcaccttgcgcacacgctttacgttgagctggagatttccctgaaaacttgtgatgtctcccatgactgcaatatagtctaacgaatcaaactcatcgattccaaccgagcccggctcccagatcttggcgtccagcgtaccggtcttatcctgcaggatcagattatcataaggctttcccgcctttgtcagcgctgactgctttaccttgcataaatagatttcgttgattctctcgccctcacgcaggctctcaatatacttcatttctgacctcatttccataatatggcggtgccgcaaggcaccgccttctgttactatcctctactttaacactccgacctgtaccgtgcaggtgatctcctcatacttttcagcgccctgccgctgtacaacgatctccacctcgtcgcccggttccaatgccagaagcttgctctcataactgtccaccgtgtagacagcctctccgcccatctctgtaatgacatcaccgctctgcagccccgccgccagtgccggtgaatccatcttgacatccttgatatatgcgccctttggaatatcgtattccttggcggttgccgctgataccgtcgtcaactccagaccaatatacggaatatcctgattgttggacagtttttcgatcagctgctttaactcggagatcgaaatcgctgtcagtgtcgtctgatcctcctcatttccataatcctgcatgaccagaccaatcacttcgccgttcacgttgatgatgacgccgctgccgctgctgctgccaacaatatccgtcgtaaagacggtataattattgtcaatcgtggaaatcacattattggtagatgtgatgttgcccgtgaggatcgagtagttcgttccaagcggacttcccaccgcaataaccatggttccctgcatcgtcgtcaatgaattcccaagcttcgccaccgagatcgcattcatggtatccgtatccacctgctccttcggtaccgagagcaccgcaatccccgtattgccatcgtagtgcttcatggatgcctccaccgtcacgtcattgataaatgtaacgtagacttcctgtgcatccgagatgaccttgcgctccgttaagatcagcagttcctgaccgttatccgctatgatgataccggatgcctgtcctctgctctcgtaggaattgttgaaccagtccgtatcactcttgacccccgtcacggtcacgacaaagcggttggcttctcttcccaccgcatacagcttgttctgcacgttctgtacatccgcaatctcaagctcctcgggctgctgtagcggcggttcctcggaaggtgcctgtggttcctcggatgcctccgtctcctcggatgtctctgtctcctcagtcagctccgtcaccgcaaccgaatcctgcggaatggtgaccaccggttcctcctcggggtaaaacagtgattcaaacttaggctgaaaatacgcgaaaaccagacttgctatgattccaaaaacgactgccatcagggcgataaaacctgcctgcatcagcaatcgcttcttattgaccggcttttctttgattttttcgttaataaaagaaaactgatcgttatccttttgctgcatgatttcctcttttctgcatgtatttacacacgaatttctgaaaaccgtaccagtaatcattataaaatgaatcacatacgcttgcaataggattctacaattcttttcaggttccgctttccaagactcccggaatcatatataataagaaggacataaccatgtgacaatcaaatcaaaggaactgctatgaacgaaaaagtattacacaccttagaatataacaagattctcgatcaactgaccgaatatgcgttcagcgccgacgccaggtcgcgctgtcagaagctgcgcccgatcaccgaccgcgcgcagatcgaacagctgcagcagcagacatcggatgccttaagccggctgttcaaatacggctccctgtccttttcgggagttacggacatccgtgattcactaaagcgcttagagatcggcggcgccttaagcgccatcgaactgctgcgcgtctgctccctcttagagtccgcgaaacgcgcgaaggcttttgccagatcacaggacgacagcgatcagccggacgattcactgaccagtctttttgccggcatcgagcctctcacgccgctgtgtgacgagatccggcgctgtattctctccgaggacgagattgccgacgacgccagcagcacgctgcactcgatccggcgctccatgcgcggaatgaacgataagatccgcgcacagatgaactccatgatcaacaacaccacgaccagaagctatctgcaggacaccgtcattaccatgcgcgacgggcgctactgtctcccggtcaaagcggaggcaaagtctctcgttcccggcatgatccatgaccagtcctccaccggctccacacttttcatcgagccgatggctgtcgtcaatctgaacaacgaatacaaagagctgcagctccgtgagcaggaggagatcgaggtcatccttgccggcttaagcaatctgaccgcctcctacgccacacagctgctcgccgactatgaacttctgaccgagctggactttatttttgccagagcggctttcgcgcagacatacaacggggtcgccccgctttttaatgatgacggacggattcacatccgcaaaggacgccacccgttactcgatccgaaaaaggtcgttccgatcgacgtacggctcggcgaggatttccgcctgctgatcgtgaccggtccgaacaccggcggtaagacggtctccttaaaaaccgtcggtctgctgacgctgatgggacagtccggcctgcatattccggcgtccgagcgctcggaactcggtatttttgacgaagtgttcgctgacatcggggacgagcagagtatcgagcagtcgctcagtaccttctcctcccacatggtcaacatcatccgtatcttagagcaggtcaacgaccgttctctggtacttttcgatgagctctgtgccggaaccgatccgaccgagggcgctgcgcttgcgatctccattctctcgaagctccacctttacggagcacgcattatggctacgacgcattacagcgagctcaaggtctatgccctctccacaccaggcgtggaaaatgcctgctgtgagttcgacgtggcgacgttaagtccgacctaccgcctcttaatcggtattccgggcaagagcaacgcgtttgccatctctgaaaagctcggtcttccgtcggatctcattaccgacgccaaggggcgcatcagcaagagtgagggcgattttgaagacctgatcgcagatcttgagaagagccgcagcacgatcgagcgggagcagttagagatcaaccagtacaaagccgagatcgagtccttaaaggaaaagctggagcagaagcaggagcgtctggattccagccgcaacaagattctgcgcgaggcaaacgagcaggcatacaatatcttaaaagaagccaaggacgtcgccgatgagacgatccgcaatttcaacaaatacggcaaggcgggcgcaccggtcagcgagatggaaaaagaacgtaccaagctgcgcggcaagatggacaaagccgcacagaagatgtccgagcagaaaaaagcttccgtaccgaaccacaacgttccgaagaagctgcgcatcggcgacagcgtcaaagtcatcagcatgaacttaaaaggcaccgttcattcccttccgaatgccaggggcgacctgtatgtgcagatgggaattctgcgctctctggtcaacatcaacgacctgatccttctggaagaggatgccgcaccgggcaccaagaagttccagaagaccagtgccggcaagatcaagatgagcaaatccgcctccgtctccacagagatcaatctcatcggtaagacgaccgacgaggccattccgcttctcgacaaatatctggacgacgcttatctggcacatctgccgtccgtgcgcatcgttcacggaaaaggcacgggcgcactccgcaacgcggtgcaggctcatttaaagcgcttaaaatatgtcaaatcattccacctcggcgagttcggcgagggcgatgccggtgtcacgattgccgagtttaaggactgatatttaaaataaaaatgaggagatgatgatatggcagcaaaacagaaaattctcatcgtagatgatgacaataatatcgcagaactgatttccctgtatctcacaaaggaatgtttcgatacccggatcgtcaatgacggcgaggaagccatgatcgcttttgatcagtacaatccgaatctgatcctgctcgatctgatgcttcccggcatggacggctatcaggtctgccgtgagatccgtgcgaaggcaaatgttccgatcattatgctgtcagccaaaggcgagatttttgacaaggtactcggtctggagctcggcgcggacgattacatgatgaagccgttcgactccaaggagcttgtcgcgcgcgtcaaggcagtgctgcgccgctatcagccggcaaagccggaggaacctgccgcagagttaaaatgcgtcaagtacacggatctggtggtcaatctctcgaactactccgtcatctacatggggcaggccgtcgatatgccgccaaaggaactggagcttttatattttcttgcggcttcgccgaatcaggtttttacaagagagcagctattagaccacatctggggttatgaatacatcggcgacacgcgtactgtggatgttcacgtgaagcgtctccgcgagaagatcaaggatcatgccaactggagcctcgcaacggtctggggcatcggctacaaattcgaggttcgtgacctatgaaacgtaccctttaccccaaactgctcgccggctatctgatgtacggtctgatcggttttctcatcatcacaacctttacctaccacattacgtttgcctttgtggaaaaaaaggaggctgccagcctctaccgggaatccgccctgatctcctccaactatgccgggaattatttttccaagaccatgacgctggacgagatacagacacagctttccaccttaagcacctatctctccagcgaaatctggatcgtggacacgcgcggcagcatcattctgaacacggcggcgccgggctgtgatcccacaccggttcccggcttcaacattaccgacttcggaagccgctattatcagaccggcacgttttataaccagtttacgtcagagatgctaagtgttttctcgccgatcaccgtcaactacaaggtgcgcggctatgtggtcatccacaagccgaccagcagtctcgtgtcctacgcgaacggacttgtcgccatcgcttatgagacgcttgggcttctgtttctggcagcctttgtggtactgattctgtttacctatgtggtgtacataccgatccgcaagattacaaaagcggcggacgaatatgccgccggcaactttgaaaaaaagattgatgttcactccaatgatgagatcggctatctcgccgcctcgctcaactacatggcgaacgaactgaataccctggaggacgaccagaaaaagttcgtctccaacgtctcgcatgatttccgttcgcccctcacttccatcaaaggttatgtggaagcgatgctcgacggcaccattcccgtagagatgcaggacaaatatttaaacatcatcctctttgagaccgaacggctgaacaagctgaccaaaagcctgcttgagttaaacaagttcggctcacacggcacaatgctggacatcacggatttcgacatcaatcacacgatccgcatgacagtccagacgtttgaggggcgctgcatggaaaagcgcattactttcaacctgatcttaaccggcgagaagctttttgtctccgccgatatgagtaagatcgagcaggtactctacaacctgatcgacaatgcaatcaagttcagccacacggactccgcgatcacgatcgagaccacggagaaaaacgacaagatcttcgtctccgtcaaggacaccggcatcggcatcccgagcgacagcatcaaaaagatctgggagcgcttctacaagacggatctctcccgcggcaaggacaaaaaaggaaccgggcttggtctctccatcgtaaaggagattgtccaggcacacggcgaaaacatcaactgtatcagcacggaaggcgtgggaacggaatttatctttaccctgccgttagcaaagaagctgtcccatcaggcgggcagttgactttggggcgataagttatactatgagaagcatacccctacgatttcggctggaatgcctatggaacattctgttcaaaaaatgcggcatttctaaccagccggtgactgcatctgcgatgatccgtgtcagctgcggcatggttagaaataccggattttgcggtcagaatttgccgccgcatgtttatctggaacttttaagtatctagttcttataatattacttatcgcccaaaagctctatgcttattgcggcaattcccttctctaacgctttgttatctattctgcttcgcagcatgcaagcagatctaagatttcctctctcgtctgcagtccgatcgcttttttcttaaaaatgccgtactgcatcacaacaagcatcggaatgctcatcacctgatactttaacgcaagcgccgcctgctcgtccacattgacgcttccgaacttcacctttccggcaagctcctcggacagcgcctcaaataccggcgactgcattttacacggtccgcaccactctgcccagaaatccagaatgaccggcacctttgccgccagcacctcgtcctcaaaattttcatttgtaattgtaacaactgccatattctgcttcctttctgtgcattccgccggcactgttttctgccggcagctgctctgacacacgctctattccctgccgaactccgagagtaccagaccttcgttccggtctaataccatgccgacactccatgcattgacaaacagtaacagcggtctgcccttcagatcctgaatcttcttcatatccgaggttccgaccagcttatccatatcgatgttctcattctcaatccaccggatatgctcatacggaagcgtatccatgcggatttccacattgtactcattctcgaggcggtatttcaacacatcgaactgcagtacaccgaccacgccgacgatgacctcctccattcccatattgtactcctggaaaatctggatcgcaccttcctgcgcaatctgctgcatacccttcatgaactgcttgcgcttcatcgtatccacctgccgcactctcgcaaaatgctccggtgcgaacgtcgggattccctcgaatttgaacggcttcgccgtggtgagtgtatctccgatggaaaaaatacccggatcaaacacaccgatgatgtctcccgcatacgcctcgtccacgatatgacgctcctgcgccatcatctgctgcggctgcgaaagcttgatctttttattgccgccctgcacatgtgtcacttccatgccggcggtaaacttgcccgagcagatgcgcataaacgcaattcggtcacggtgtgccttgttcatgtttgcctgaatcttgaatacaaacgcagagaaatcctcaccaaacggatcaacttctccgatatccgccttgcgcggcagcggcgagtaagtcatctttaagaaatgctgcaaaaaagtctccacaccgaaattcgtcaatgccgaaccgaaaaataccggtgaaagctctcccttcgtcacaagttcctgatcaaactccgcgctcgctccgtccagaagctcgatctcctccatcagcttatcatacgcatcctgtccgatctctgcaatcagcgccggatcgtccacggaaatatgcttctccgtaccttccttggttccctttaatgtatcggaaaacgtcataatctctcttgtgttgcgatcatagacacccttaaaattcttaccggaaccgatcggccagttgatcgggcaggtcgcaatgccaagctccttctcgatctcatcaagaagatcaaacgtgtcgttcgcatcgcggtccatcttgttgatgaatgtaaaaatcggaatatggcgcatcacacagaccttgaacagctttctggtctgcgcctcgacacccttggaaccgtcgattaccatgacggcagaatccgccgccatcaaggtacggtaagtatcctccgagaagtcctgatgtcccggtgtatcaagaatattgatgcagtaacctccgtaattgaactgcagtaccgatgacgtgacggaaatacctctctccttctcaatctccatccagtcggacactgcatgacgcgccgtcgcttttcccttgacggaacccgccagattgattgctcctccatagagcaggaacttctccgtcagcgtcgtcttaccggcatccgggtgggaaataattgcaaacgtacgtctcttttcaatctcttttcttaaatcagccaaactatctatcctccaaaaaacaaatcacttcaaaaatgccaacgcagcaaagccgaaactttgcatacgttggcactataacataatttcatgaaaaatgcaaaaacttctcttccgaagatctgtactatttcttaaataccggaatcgcctcgcccgcgcactccggggtgagatcaaagtaggacagaattgtcgctgcaatgtcggaaaagctctttcttgttccgaaattctcccctgcccgcaccggtgctccgtacatcacaagcggcgtatactctctggaatgatccgtggacggtgtactcggatcgcagccgtgatctgccgtgatcatcagcacgtcctcctcacccatcgctgctaaaagttccggcaggcgctcatcgaagtacgtcagtgcttttgcgtagccctcgatatcattgcggtgtccgtagagcatgtcgtaatccaccagattcgtaaagcacagtccgttaaaatccttcttcatataatcaagcgtcttgttgatgccgtcctcatttccggtcgtgcggacatactccgtgatgcccttctccgcgaaaatatcgatgatcttgccgacagaaagcacgtcaaagccggctcccgagagctggtctaacatcgtcactttcggcggctgtaaggaaaaatcatgtctgcgggtcgtgcgggtgaagttccccggcgttccggtgaacggtcttgcgatcacgcggccgacaccgtgctctccacgcagcatatctctcgcgatctggcagtattcatacagcttctccaccggaacgatgtcctcatgtgcagctacctggaacacggaatccgctgatgtatacacgatcagatctccggtcttaagatgctcctccccgtagtcgcggatgacgtccgtaccggaatacggcttgttgcagagcacgcccctccctgtctttttggaaaattcctcaataatctcctgcgggaaaccgttcgggtaggtcggcagcggctttggtgagatgacgcctgcaatctcccagtggccgatcgtcgtatcttttccctttgacacttccgtcatgcgggcaaccgctccggtaggagctgcctccttttccccgatctccacgccgtcgatattaaaaaagccaagctttctcatgttcggcatggaaaaataagggctcatggacgcggctttgatggtgttgcttcccgcatccccgtaatctgcagcatccggcatctcgccaatccccacgctgtccaatacaatcaaaaatactctcttcatcctatctatctcccttcctcaaaaactgcatgatcacatcatagttctccgcctgatgtggaaacgtgcacttcatgcaggacttgatctgtacttcgcttccattctcccgtctgctcttaatatactccggatttcccggacaatgacgtctctcatagagcggacaatagcagaacaggcagttcatctcctcaatgccctcatggcacggataatactgacattcccggttggaaaaaaagcgatatgaattctctgtcattataccacctctccctcatctttgacaataagcgtcgtaagatagcttccgttctcctcgagcgcctccgctcccaggcggatccgctcatccgccatcccacagttctccacgcagtagacggacagtttcttctccttctgctgttcttccaacagcgctttcagccgcgcgaggctttttccggatttcatgtacacccgggtgccggaaagcgccatcgtctcctccacctcgtacgatcccggaatcacatggatctcatcccggttatccccgagcgatattccaagactcgccgcagccgcacaaaaggacggcacgccgcttatcattttaacattgccgccccacgccgcgattctgcggtgaatgtagccatatgtggaatagacggacggatctccgatcgttaaaaatgccacaatctttccttcggtaagataagaagcaatccgcgcaaaaatctcctcgtgcgccctgcgcagcttttcttcctcctttgtcatcggaaacggcaggcagacaagttcctttttctcaatcccggggtacgccttccttgcaatctgatacgcatggcatcccgccggatccgccgccggaagcacgataagatcgctctcctccatacagcggagcgcctttacggtcaccagttccggatctccgggacccacaccgatcccgtagagggttcctatacagtgccgcagatgcctgaaatagcactctctcaccggctcatactctccaatccccttcaacaggcagaccggctcatatcccgcctcgcggagtgcggcagcaaaggaatccttctcccctgccatatcatggttggcatgatctcccgcaaccatcataaacggcgccacaagcacgcgtccgctcttatgccttgagaccttcattctcccgatcacatcgtcaatcgtaacgcttccctccacggtcgccacatagacgtcgttctctgtcacctgtgcaagcacacattccagacgctcgtagctctcatccgccgcatgctcacttccatgacccataaaaatcaccggcgaagatcccgcctccgccgccaccgatttccagagagcctccgccgttctctgataatcctccggtgtcttaagcagcgcatccgcaatccggacgtcctcaaaccacggtgcacagtctgttacctcctgcttcatccggtggttctcaatcccgtcaatgatgtgggtcggaaatacgatcacacgccgcaccccggcatcgcgcatccggcaaagcgcctgcctcacatcatctttcgcgatgccgtcccgctctcttaacaccttcctcacagtgctgctggaatacgcctcctccaccagatcatgtggatactgctctctgacaagcgccaccatgtgatcgatattcttttctcttgtctcctgataagtcgttccaaagctcacgaccaatatgccacgctccatcgcgcacctctctttctctgccgccggtgcacatgcacttcccgatacatttacctttccgacgcacctgctatccccaattcacacaccatcccccacattcaaccacaatttcatattttctacaaattctgctgtgcctctacaggaatcagctttccgagtgtttttgcatactcgcgcagcgcgcggttcgcttcgttgtaaggtccgaaagcttccgcacaacagacacacgtttcgcacgtctcaatccacgatctcgcctccgcgatctccttctctgcgaccgggaaaaacggcttcacggaaaccacccggcttgccgcggcacacgcatcctgatattccacatcattctccatcagaattcccgccgcaaacggcacatttttccgctgtaaagcatgatagaccggtatgccgctgcccgcgccgccgatcacaaagatcttcggccggctcttatttccgcgcagatacacagctcctgtccgcggatcaaaacactccgcgtccacaccgtataatttctgaatataatcacccgaaaatacctcctccggcgtccctgtttttccgatgtggtctccctccacacaggcgatcacatccgatacctttagcgccagatccagttcgtggagcgacatgacaaccgccatatttctttctgccgcgagtcttcggatactggataagatgtcgatcttgtaacgcatgtccagataggaagtcggttcatccagaatcagaatccgcggctcctggcagatggcgcgtgctaacatcacccgctgtctctgtccgtcgctgatctgtgaaaaattccggtccgcggtgtccctggcatgcaccagctgcatggcgtcatccacaagcttccagtcttctgcggagagaatcccgagccttccggtatacggatacctgccggtcgcaaccacctcgcggcaggtcataaattccggatgaagccgctccgtcatcaccatcgcaagcgtccgtgcaacttcctcttcccgcatccggctcatggatgtcccctccagaaagatcgttcctccaagctctgcaagctgtctggtcacggtttttaatatcgtggatttgcccgcaccgttcggtccgatcagcgtcaggacatttcccggacttacatgcagtgaaatatggttaagcagagattttctgccgtaccctgccgccacatcctcaagcctgattccagactcttttttcctctgttccatcacacgttcctccgttacctgtcctcattcctgcgcagcatcatcacaatcactaccggcaccaggaatacggctgtcaccgaactgatcgaaagctccgtcggagcaaacaccgtcctcgcaaagccgtcgcaaaacagcgtgataattgccccgcccagaaaacagcccggtatcagcagaagcggtttcgccgtcttcatcgccgtcttcaccagatgcggaaccgcaattcccacaaaggagatcggtccggcaaaggccgtcacgcaggcagacagcagactcgacagcagaatcagcaatacgcgaagcagacggatcttaacgcccatgtttctcgcatacgcctcgcccatctgatacgcaccgatcggttttgccagaaaaaaggtcactcccatcgtgactgccaccaccgctgtcatcatccgcacattcgaccaggtcattccggagagactgcccatcgaccagttgtgaaggttcacaatgttggagtcatccgcaaacgtcacgcagaaatccgtgattgccgaacagatatagccgatcataatgccgcataccacaagcatggacattttttttacccggcaggaaattaagagcacgaaccccatcgcaagcatcgatccggcaaacgccgccacaatcatgccgagcgaactgatcgccctgcccatttccaaaagggcaatcatcgtcagcgcaaccacaagcttcgccccggatgagatgccaagcacataaggtcccgcaatcggattctgaaaaaatgactgcagcagaaatcccgcaacagagagcgctccccccagaataactgccgcacagatccggggcaggcggatctcccagacaatctgccgcgccgtctcatccgccgtgcctccaaagcggtgcagcagaatgtccgcaatctcacttcccgtcatcttgacacttccggaaccgatattaaagaaaaacaacccgccaagcagcaggatcatcgcgccaaaggctatcacatatcgtttcattcttacctcacgtgttttaaaaaccgataattatcatctgtctcatccacaagcaccttgtgcagatcctcaatgaaatcacaggttcccgtggattcctgaaagaaattgcttccggtacaatatacatttccctcttttaccgccttaaaatcagaaaacagcgtgctttttgccagaagttcatcgacactgtaaagctccccctcgatcgtactgttgtagatgaggatgtcggcgtccttcgctgccgcataaaaatcctccatctgcatgttcatcgtggacagggcattctcctccgccgaaagacggtcgtttaggacgtaggtgccgccggcgagtccgatcatctgcgcaatatagtcattcggcttgcggacattgaccgctccgttcgccgtgatataaaaaaaggccaccgtgcggcctgtatcttccttttccatgattggttctattttttttagctgttcttcataaaatgcatcggcttcctgttcttttccatacaaaagaccatataaccggatccactccagtcttccgagcggatgttcttcatagctggaacgttccaccatgaccggtatgccaaggctctccagcttttcttttacctccggattatgtccgatcatcgtattctccagtgcaaagttgcacccttcctttaaaatcagttcatagtccggttcattgtattttccagcatacagcatacggccgtcttccatcgcagccgcagctttctctatataccagtccgactcctttactcctgtaagccggatgtcagaaagcgctccgatctcacggatcatatccatcaccgatgaggataccagatacgtgtgatccagcggctgttttaacacaaccacatcctccggcacatgttccggtaccggaacattctccggcaccagcaaaaaacggctgtcatcagccattgtaatcagatcatactccccgtattgttccacacgatactgcgtggcataagagagatcccactgccccgtcttcgtcagttccgaaaagtccgtctcttttaacgcaaatgacagtgtgtactcaatctcatgcggcacgctcatcgccgtcgtatccgcaatcaccgagatctcacatggcagcttttcaatcggaatcgtaaacgtcgagttctctcctgcctctgcctcgttgtagcaggtctcatcctctaccatcatgtaatcataatacgggctgctccacacgatggtggcatatattttgccgtccttcaccgtaatcgccgccggtgagtccaccgtcgccctgccgctgccgccggtgagcgtaacgtccgcctgataggttccgtccgccagtttttcgctctgcggcgtgtggcacgctgtgaggaaacagatcacagacagcaggcatacgatcagttctgttactttcttcttcatctcttactccgcaaccgggtcggatacactcaccttgtgatcgtaccacacacccttggttccaataattgccagatcaaattcctgatccagtgcttccaccggaatatcgaatccgtacacttcctcggatgttccgtcactgtaggttacggtatccttcgtcggctcaagcagcttggctccgctcttctgcgcgtcctcggcggttcccggatacagatttacgatactctgtgacacaagacttacgtgaatggtcatcttgccatccttgacggtaagtgtgccgcgtccggcacatgcctcattgacatggaacatactgctgtcagtgtcgaagacggcactgtacgtgccgtcctccagatctcctgctgtggttgctgctgctacagtatctacgctgccgagcgaatcgatcgcatcctgtgtatgggatacatacagctgctcaatcgtatcgattcttccaagacctgcgatctggcatgttacactctcaaaagatccgtctgcctcaaacatgctcttccaggaatcatcatcatcccctgccatatcgttgttggcatgatctcctgccactaccatgagcggtcttaataccactttcgtgtaaccggcttccttgactgcctcgatcactgcctcacatgcagtctcttccggctccccttctacggtgccgatgaagacattcgcgtagtttaagtccttcatcacacttgccatctggctgtagcttaccttcgcagtatgagcggttccatgtcccatgaatacgaatgcggtaccatcctctgctgccgcatccagggagtcataacctgcctctgcaactgcctctgccgtgatcgcctttgcaacggcttccttatcgtcattgatcacggttgcatctgtgccaacctcaccgaggagcggttctgcaactgcaacggatgtaaactgatcgcggtacttctccaccgcttccatcagctcgtcatactctgcgccatgcatcagatgtgtcggctgaatcacaagattcttcaccccatttgccaccgcgcggtctaacgcctggtctacattgtcgatcttctcatcgtctctcgcctgtacatgattgatgataatctgtgcggtaaacgctcttcttaccgaccagtccggataagcctccgcgattgctttttccacgcctccgatatcctcagtacggctgtcattgaaagatgttccgaaacttacgacaaggatctcattctcaccgatctcatcctcatttaacggatcgtccttggaagcgtctccggtatctcttccgaaataatccggatctgcgttctcaccttcgacaagttccttctgtgcgtcagtcaatgcatcccatgccgcctttgcctctgcacactgcgcatcggtctcatccgtgcgctcctgcacgtagattgcatcgatcagcgcagcaacatgatctgccgcatcctgatcggatactgtctctgtcccggtctccgcaacagcctctgtctgtgctgtctgcacgttctcctctgtggttgtctctgtcttactgccgcatccaccgatcatgccagctgcaagtgtcaggcttagtaagagtgccagtgtcttttttttcataattcctcctgctgatgattgtatattttccataaaacaacagaaagaaactccgctctatgaaacatagaaacggagcagctgatcaacacacaaaagtacgaccaattactcgtgatccggaatctcttcctgtactatcataactggcaggtttcctggctgatagatcctcatgcagctacttaccttcccggcgcatgcgcgccagtggcgtaaagctttcgtatctgcactccctaatcacagtgacgagatcgtacaggattcccacctgtttcccttttaaccggtacaaaggctcatctgtacatcttctgcacatacctttgcaccggcaccagttacttttttatgaaattaaaaacatattaccattgcatgtttattttttcaagtagattctgtccgccgcctttttcaggaaacggtacgcgtattccggattggagtaataatatagatgcgggaatcccatccattgcgacggactctcatgaacgcactcccacgatcttccgtttaccggctttttggccaccgcacccacgccgttgtccgtgctgtcataatagtgaaactcatgccccgcaatctgtgcgcccgccgggaggaagttctcctccttttccgtaagcatcacatagccgaagcgcaccagtttcccggtatttatagccgacgccggaatcactcccgccatcggatagcacactccctcatcgtcacagagcgtctcatgcagatagaggaatccgccacactccgcgatcgtcggcagaccgtccgccaccgcgtcgtgcaccgcttttcgcattgggatgtttttcgacagcgcttttgcatgcagttccggatatccgccgcctaagatcagtcctgcaatcccctccggcaggctctcatcctgtaacggagagaacggcaccagctcggctcccgcctcccgcagtagctgcagattgtcctcatagtaaaaaccaaacgccgcgtctcttgcaattccgattcttacatccgcaatcttttttttcggcaccggatctgtctccagcgcttctgcggatgcggcaatcgcaagaagcttcccgcagtcaagcgtttttccgagcgtatccgccaccgtctgaatctgctttttcacatccgcaatctcttcgggcatcacaagtcctaaatgtctgctgtcccagtgcagttcctttaacttcggcagacaccccagcactggcagcgacagctcgcgctctatttcgggacggattgtctcacagaatgtcaccgatgtctgatttaagatcacgccccggatcagatgatgccggtcatagtccagaaagccccttatgaccggcagaatggaacgccccattccatgtgcgttcaccaccagaatcacaggcgtcttcgtcacctctgccagatggtaggacgatccctccttgcggattccaccgaggccgtcgtaaagtcccatcacgccctccatcaccgcaaggtctgcgccctctgccgcgcgcgcaaaaaggcttttcgtcagtctctccccagtgaaaaaagtgtccagattccgggaagggacgccgagcaccgtccgatggaacatcggatcgatatagtccggcccgcacttgatggcactgacgctttttccttcctgtgaaaaaagcatcatcagcgcacaggaaagaagcgtcttgccgctcccgcttcccgccgccgcaatcatgattctgggaatgttcatcttacctctcctcccgtctgtccggtttttgttcttccccctcgccgttctccgacagggaaaaagcgatcacatagatcggattctccgcctgcatcagatgatgggtgccagccttttttgcacggctgaccgcaatctgtgtgatctcttcgtcacagatcaaaagctccttccgcagtgccacaacctcggcgaccgtctcaagtgagacggcatttaagacaacacgcacatccggatttttctcccggagtgccaaaaggatctcccgcagtctgccgccgcttccgccgatgaacgcgtgcgtcggcgccgggagttccccaagacattccggcgcctccccctttacgacaacaaggttcttcacgcctgcacgcgttgcattttccgcaatcagtccgcaggcttcctccccgtgttccacggcgtacacccgcagctgttccgaacgcagcgccgcctccaccgctatcgagccggtaccgcttccgatatcataaaatacgctctggcttcttaacccgagcctgcacagagacagccagcggatctcctcctttgtcatggggacacgtccgcgcacgaaccagcggtcaggaactcccggagcgagcgtctccccctgcgcccccggattttcaatcaggcaggcatagagtccatcgtcctttaacgtccggcacacttccggcgttccgtgccagatctgctcttccttgtaggaaagctggtatccgatggtaagctccaccccggacagtcccgccgcctcaagttcttccccgatgcggattagatcgcttctgcctgaaacaattaaaaatacctttttctcactgcgcacacacgcgctaacatccgcctctctcccgtgtgtgctgactattttcgcgtcctgccagcttttacctgcgcgcgccgccagataggcgagcgaagagattcctggacagatggtgatcccggcttgtaatttcccaagacgcacttcttcctgcaatgccttatgcaccgcctctgcgccgctgtaaaatccggtatcgccggaaaataagatggcaatccgcacggttcctttttccctgcaggaataaatatacggaagaagatctgccggaaggtacgcctcccgtttttctgcatccggtgcgatcagagaatccgccgcggcaagcagccgcttcgctccgcagaccacctccgcctgcgcaatcgcctcccctgcctcgccggtgaacagctttgtgttccccactccgattcccacgagagaaatctgcagcggctgatgcttcgtcccgctctttttcccgcagagtgtttcgatttcggacaggactttttccatgctcatcccgcccgcctgttccggattcttaatcataacaacaggaatttttgtgtgctctgccgcgcggatcttctctgggaatccgcccgcctgtccactctctttggtcaccagcacgccgatgtcatactgccggatcaacgcctcgttgagctctgttccaaaaggtccctgcatggctatgatctgcttccccggaatctgttccctgtgacagatttcgatactctccacccccggaagcacacgcacaaaaagcctcttgcggatctcctcccggacggcataggcgtgcagttccttgcttcctgtcgtaagaagaatgtttcccggcagactagacagcaattttacacattcctgtgtgtccgccaccgtgtgtatcatccactcgtgctctgcgatctcacgctccgccgccgtgctccggctgagtcttaaatagggaagattggtcttttttgcactttctttgatgtgttctgtcacctccaccgcgtagggatgtgtggcgtccaccacagcaagaaacgcaccggttcgcatgagttcttccatttccggttcgctcatacggccttcccggatcacaagatgctcccgcgggcgcatcacttccctgccgtactcggtcgcaacactcgccacgcagtcgatctgcctgccgcagagtacctccgctatttttcttccctccgttgtcccggaaaaaatcaatatttctgccatattctctccatttccaggtctcttatccgcgctcatctgcacgcgccttagcgcctgtcccgatctgatagccgcgttttgtgacaagcttatcccccatgatgaccgactgtgagttgccgataaataccgtggtaaacatattcacctgagtctcacgcagttcccgcagtgtgcaggtatgcgccgtctccccgtctcttctgatattttccacatagccgcaggcacgcgtttccttcgccccggcatccaacagaatatcacaggcgcgctgcagataatctgcacgcttcctgctcgacggattgtagagcgctatcgcaaaatcccccaggacagctgcccgaagccgcgctttaatctgctcccacggagtcagaagatcgctcaagctgatcacgcagaagtcatggtttaacggcgcgccgagcactgctgccccgctgctcgccgcggtaattcccggtatcaccgtaagttcgcaggacggatactcctcgctcatctcatacatgagcgacgccatcccgtagatcccggcatccccgctgcagattaacgctacgcgttttcccttcccggcctcctcatagcacatcctgcaacgctccacttcctggcgcatcggggtcgacaaaaacgtttttcccgaaaagcgttccccgagaagatccagatacaccgtatatcccacaattacctcacaggattccagcacagtgagcgcttcctgtgtcatatcttcctctctgcccggtcccattccgacaatatagatctcatatttcatcaaaacttcacactccattttctctctgctatggcaagcgtcttaccctcacaggctgtcttttgcaccagaagtctgccgccctcccccgcagcgcagaccgccgcgcgctcacacacattatccacgccgacctgttgtgccacaaagtcggacgacgtgaatgtaccgtccgcacactgtaggcgcccggccgggtaggtgatatagggaaccgccaaccgttctgccagcgccagaattcccgcttcatccgcctttacatcgaccgatgcgattcccgccaccgccgcccaggaaagcttcgcaagttccagagtctctcgcacaaacgcttccagttcttcttcgctcttgccccttctgcagccgatgccgaacatcaggcaggacggaatcagccataagctgcattgttccacatcttcgcactgcggcgcaaccagcacatccaccggcttctttggcggatacggcaccagccttacctccggcggaatctctccttcacattctccggcgacggacatggtaagatacccgtcgcgcagaagcctggcggacacccaggcgattccgtcatgactggcaatggcaagatggtttgtcgctgcaaatacatccaccgcaaaaagcccattcacatccgtcgccgtggtgagcacggcagtcgcgccgagcgctcttgatagctccccggcaagccggttggctcccccataatgccctgcaagaagcggaatcacgaactgtcccgcctcatctgccacaagcaccgggacatcggaaagcttatcttttacatgcggtgcgatactcctgaccgcaatcccacatgcaccgataaacaaaagtgcatttcctgctgcaaactgttctcccgcccatgtaaaaagcggctgctccacaggtataccgatcccgtctgcccggacgtcactgcattttgtatataatttgcaggaccatgcagcatccatcactttttgaatatgttctgccagttctgctcccctgtaagtaaaactgatgacagctatatccgtcttcttcaatctgtctctccctgtcccttcttcgccttccggtatcccgtggtaaatccgggatcatacagctttgaacgctcatactccggcgccgccagcacatctcccaccagaatcagcgccgtcttcgtaatctgatgctccgccgccaccgcagcaagcgtctccaccgtgcacacgtatgcctcctcgtccggccaggtcgccttatagacgaccgcagccggcgtatctggcgcataccctccatccatcagtctttccgacaattcttttatcattcctgcacttaggtagactgccatggacgcctgatgtgctgcaaaactctcaatgctctcccgctcgggcactgccgttcttcctgccattcttgtgataatcaggctctgggagatccccggcagcgtatactccagattcagagccgccgccgcgccaaaacatgcgctgacgccgggacagctctcataggaaatcccctccgctgcaagtacatccatctgttcacgcaccgccccgtagagactcggctccccggtgtgaagccgcacggtggtaagccctttttcctccgcctctcggatgaccgcaagcacttcctccaacgtcatttttgcgctgtcatagatctttgccccgcttccggcataagaaagaagctccggattcacgagcgatcccgcatagataatgacatccgcctgctccagcagtctcattccgcggaccgtgattaaatcctttgctcccggacccgccccgacaaaatataccataccgtttcctccttaaactgcgttactgcaaatgttcttcttccccgcggattcgttccagaagttctaccgcaccgtcgcttctcgccagctcgccgtacccgttcgcatagagaatgcattccacacgcagtttctctttcacccgcttctttaaataaaaaagaatctttttcattaaaagttccatcgtcgcggaaagacatccgtccttggcaatgtaggcgagcgcctcctccgtcacaagacagtctaagatcttccccagcgtatcgggcgcacacccggcgcggtatgccgcagccatcagaagctccatgcgcgcgtccgcctccctggaatgtgtgtccataattccgccggagagctttaccagctttccgatgtgtccggtcagaagcaccgcctcaaatccgagctccaccgccatatccatcgtcttcccgataaaattgctgcacttgacgcttcggtccagatcgaacccgtaagcgcgcttcatatattgcagaccgtaatttcccggtgagattgccgcaaaccggtttccctcttcgcgcttctgcttaagctccacatagatcgtgtcaaggagcgcctgactgctcatgggctccacaatcccggtcgttccaaggattgagataccgcccacaataccgagtctcgggttgaacgtctttttggcaagttcctctcccccctgcaccgaaatctccaccaaaaggctccccgcataatcggtaagcgcacacacttcttccacctcgcgggtaatcatctcccgcggcacatgattgatcgccgcgctcccgacgggctggtctaaccccggtcttgtgaccgttccgacacccgcgcctcccgtaataagaatctgcggttttccgcagtctttttcctgtttctgctcctgccaggatacttccgcaaaaatcagtgttcccgtcgtgatgtccggatcatctccgccatcttttctgacagcacagcgcacggaatgctccgtgcggctgatctcttccatcctggcatggtagaggatgccttttggcgtggtgatggtaatctcgtgcttttctctgccggtaagaagcatataagccgccgcctttgccgccgctgcggcgcagcttcccgtcgtaaatccatagcgcatgggctcacctcccaagctcgtagagaatcgcattgcaaatggcagccgcgacattgctgccgccctttcttccacggtttacaatatgcggtatcttcgtctgtaaaatcagttccttcgccgcctccacattgacaaacccgaccggaacgccgatgatgaacgctgggcggtagccctcctctatcatcccgtatagctgaattaaagctgtcggcgcatttccgatcgcaaagatgaccggtttttcgatctttgccgcccgttccatgctcacggtggcgcgggtaacgccccgctccttcgcctctcttgccacatcctcgtccgccataaagcagtgtaccgatccgccgtagcgtgcgagcacgcgcttgttgatgccggagagcgccatgttggtgtccgtcacaatgtccgcgccctctgtgatgagccactttgccgtctccaccgctcccgcggagtaggtcatcgtctgcgcataggaaaaatcggcgctcgtgtggatcacacgcttcgtgaccattgcttcctccacaggcagcgtaatcccccgaagctgcaattcttcctcgatgatggaaaagctgcgcttctctatctcctgcggcatcacatactcgattccgtcgggcactgctgccggctttttatcatctttgccgttttccaccacgctgcttcccgtcacctgcgccagcgccgcaagcaggcgttcattctcctcgcgccgtctgaccgcaatccggtaatatcccccggaaagtccccggtagttgctgcagtcgcggatcagaatccccttctttaagagctcttttgccagcggacgcccgtcctttatcatcaggaaattggcgtttgacgcaaacacagtgatgccaatttccgacagctgctccgtaagccaggcacgctccctgcagacaaatgccaccgagtgctccacatacgcacgctgcccgcaggccacacatcccgcctgctgcgcaaacaccgacagattccactccggcagatcggctcttatcgcttccgtaagagcagcatcgctgcagacgagatagccgagccgcactcccggcatggcatagagcttcgtaaatgcccgcacgatcacaactcccggataattccgatacttttttaagaaggaatagcgttcttccgctccggtaaacatcacaaaacattcgtccagaatcagggtcacaccgtacttctgacagcgctctgcaatcttctccaacagttccggctccaccaccgtacccaccggattattcgggactgccagaaaaacggcgttcacaccctccccgatggcagtaagaaagcgctccgtcaccgcgtagccgtccgtctcaagcagttcgtggcagcagatctctgctcccacagactttgccgcatactcatatccgtaaaatgacggtacaggaagcagcacctttttcgcatgaaccgctcttaaaatggcaggaaacagttctgacgcaccgtttccgcacacaatatccgcaggcgcaatcccttttgccccggcgatggcatcccgcaatgcctccgaccggatatccggataccgctcacaccatgccactgccgcctcaagcgcctcacgcacccgctgcggcatcccgaacggattgatgttgaccgaaaaatcaagcgatacctgattgcggtatatgtctcctccatgtatgttctgctgcaccatcccggttcttcctcctgttctgtctctatgctaccacacaatggctgtcacgcacaaccagacagccatacaaattccccatccgaaaaatgccatcccgtacagcaggcggttggcacgtctgatatcctctgtctccaccgctctgagcggatcaccgatgtacggctttttgacgattcttccaaaatagctggcatctcctgccagtcttatgccgagcgctcccgcacatgccgcctcggtctgtgcggagttcgggctggcatgctgataccggtcccgcttaaaaatcttcatcgcattcttctggtcaaattcgtttccaaggaaacagcaggataagatcatgagcatggcgctgatgcgcgccggaatgaaattgacaacatcgtccagcattgccgccgccgtgccaaatgcgtgatacctgtcatttttatatcccaccatcgaatccatggtgttgaccgccttataaaaaaaacctcccaccggtccaaacagcgccagatagagcatcggcgcgatcactccgtcggaggcattctcagccacggtctcgatcgccgccttcgccacgccctcctcatccaaacattccgtatctcttccgacgatcatggagactgcctttctcgccccgcacagatcatgctccgaaagccgcttgtacactttcatgctctccgtcttcaagcattttgtggcaagcatctggtaggtcatgacactctctgtaacaacccccgccgccggatggatccggtacgccgcaaacaggactgctgccgtaaaaaagagtaccggaagaagcacgaacgccacaagccaccttccctttttcttctcggcggcttcatttcgcaccgcgccgtctgtctctccaagcagctttcgatccagccatccgatcaggcgcccgatccaccggatcggatgcggaagccagtacggatcgccgaacagcagatccatcacaaatccgattgtaaacgccgtcatatgatataccgagagcatgtcattcctccaactttctcacatccgcaatttttatcgtgtctcttaaagtatttcccgctgcattaaattccacagacagtcgtcctttatatcctttcgcatttgcgcactggtaatcgtaataactgccctccgcaaaagcgtccagaagcgccatgatcgttccgccgtgcacgatgagtgcaagcgacgccggaagcttctcccgcgtccacacttccttaagcagctcacaaaatccctccacgcaccgtctctggaactgttctctgctctccccttgcggaaacggcagcgttccgttgctgtcgatccacgcctgatagcggacatccgctttcagttcctcacagttatgcccttcaaacgcgccaaaatccatctcccggaactgatcgaaaacgcatggcgcctgtccggggtacaacagctctgccgtctgtctgcagcgctccagcggacttgccgcaacgcatgctgccgccggataaacgccttttttctgcaatgtgagaagctgctctctgcctttttgtgaaagcggctcatccgttcttccgatatagcggtgctcttcattcccgggcgtcataccgtgacggatcagtgccatgtctgcctcatacctcatttgatccgctctccgatcccgcacacaatgcgctccacgcggtctgccttatttgccagttcacacagcagcctgccggtcagctcccggtactcgcgctcctcatgctccatcggcacgatcccgttgccgatctcatcactgatgatgatgcagtccgggtgttccaaaagaagctgcccggtcagcgctcttacatccgctccatccttaagcagcctcttcacccacagatgatagtggttgcagaccggcgcctccttcaatgttctcccggtaaatgtctctgtggctccatcccacaccggatgtttttcccccggatgcctgtctgtgacataagtaagctttccctgtgcatatccgccaatgtatagttccatgtgttatcctttctgatgcgtcatcccgcaatgcttcattcctagccgatcagccctgccgccgccacaagcaccgccatcacaccctcgcacagcgtcacaaaataccccgcgagatctccggtaataccgccaaattctcggtaactcttctgtctgtagtacgcgtaggtaagccctgctgccgcacacgcaagagcgccggttttcaccgatacggcaagcatcagcccgacgcagagtacaagctgcagatacagcgccgttagcaccacccgccggtgcgcctcgctcgcgaactgatagagcatcccgttcgtcttggcacagcgcagggatacgacaccgatcccgcttaaggtgcgcgacaaaaaaaagcctgcggcaagtactaaaatctgttctttttccgtgatcatggacactgctcccagatagatcagctcatacatcacaaaacagatcacggcaaacgcgccgatgtgggaatcttttaaaatctccagtttgcgctccctgtcgcggtaagaatgcagcgcgtccatggtgtccataaacccgtccgcatgaaatccgccggatattgcaagcggcagaaccgctcctaccgccgcccgggcagtggacgggatcccatacacgcccgcgaatcggttccacaacaggaaacacaatccgatcaccgctccgacccacgggaagaagcacagcgtatagcgcatgtcctcctccttccacgcgaactgcggcaccggaattttagaataaatcgaaaatgctataaaaaaagactttatcacggacatgccggtgctcctttctgtctgtgtccctgtttctctgccaccgctaccggaagctttccctttcttgcaacgggaattcccgcaatcacttccaccacaacgtccgaacgctctgccagtctcacattgatgctgccgagcgcccgaagatattccatggtggaagtatcatagacgatgccatcctcaaacacattgttggtgacaatgacaagttcttccgtctcctgcgccagcacgccaatctgcgtgacaatcttttccgcgacctgctcactgcccgccggttcttccgtgtcaaacatttcattggcagccagattcgacatgcactccaggagcaccacgccgccaccggcctcccgaagtgcgggaaggcactgcatgatgtccgtcggctgctcgatcgtcacaaagcctttgcctgcgcgcatccttttatggcgctccacctttttttgcccctcctcgccgaacacatgcatggttgccaggtagaagtgccttttctctttttgacactccaatgccactttttccgcataagctgactttccgctgccgcttccgccgatcaccagaatcatgtcctactcctctctgaggctacccgaatctgtgatacggtgccacatcaatatccgcaaacgtggtgcgctcgccgtagatcgtccgcgcaatgtccagcagtccgcacatcatcacagctccggttccctctcccagcgccagtcccgcatctaacaccgggcggattcccagttcttccaatatgcgctccgccgccggttccctgctcttgtgtgacggtatcacgtaatcgcgcacgccgggaatcatcctctccgccgcaagcgcagccaccgcactgatgactccgtcaacgaccaccggcacatgtgccagggcgccgccgataaacacgccggaaagtccggcgatatccagtccgcccactgcgcacagcacatcaaatgcgtccgcctgatagagttcatgcatctggattccctcttcgaccaccgcaatcttgcgtaaaagcgccgtgtcactgagtccggctccctttccggtgatctccttcggatcgcaggataacagtgccgccgccaccgcactgctggtcgtcgtgttgccgattcccatctcaccggtcgcaagcagcttatagccctcgtgcgcaagccgcttcgcaatctccatgccgatctcaatcgccgccagtgtctcctgctccgtcatcgcccgttccttgataaaatttctggttccgcgacgcactttgcacggcagcacgccctccggcgatccctcttcgttgattccgatgtccaccggtattacctcgacgccggctgcttttgccatccggcagacggagctcgtccctctccccatggctgccgccaccttcgccgtcacatcctgtccggactggctgatcttctcctccacaattccgttgtccgcacacatcacaaccactgcttttctggaaatatcaagggcgggatcacgccggattgctccgatgcgggcaaacaattcctcaaattctcccatcccgtccagcggctttgcaagcgcatcccagttgccgaggacttccttatagaccgcctgatccggcggctctatcttcaactgtctcatctgctgtctgtctaacatcccacacacctctctcttttgtcactcatattcccgcatcatcttatagatcgcatcgagatccagatacttgcgcagcgttgccgccagcttgtcgtactgctgctccttgaacaatccgtagtccacgccgtcctccccgagcacgagtcccttcctctctgcgaggtgccgcacgatcttcccggcgattgagccatggtcaaaaatgccgtgcacgtaggtgccgcacacatttcccgcaaagacgccgtccgtgcgctccttcccggtaatctcgtcgcggatcctgcagaaaggttcgcagtccccctccggtctgctgattcccatgtgaatctcatagccgctcagttcacatccgtccagcatcccgccaagaatctctccgccaacccgggttcgcactttctgttcccccagctctgtcgtgaccggaagtaatcccattccccggatcacaccgcctgtttccacgccgtgcgggtctgcaatctgttttccgagcatctggtagccgccgcagattccaaaaatgaacgtctccgcgcttctgtgaagaatcgccgcctccagaccgttctggcgcatccattttaaatcctccatcgtattcttgcttcccggaagaagaatcatatccggatgatgcagcttttccactgaatcgacatagcgcagcgacacatcctcaaactgctcaaataccgagaaatccgtaaaattggagatgcgcggaaaacgtatcactgcaatgtcgaccgccgcctcctgcctcgcatcaaaccgggtcgtcagactgtcctcatcctcgagggaaatctgcatgtacggcaccaccccgacgaccggaacgccgccgcgctcttccagcatccggattcccggcgcaagaatggacacatcgccccggaatttattgatgataaatccttttacccgcctgcgctccgactcctccagaagaagctgtgtcccgagcagctgcgcgaacactccgccccggtcaatatctccggcgatcagcaccggcgcattcaaaagttccgccagccccatgttcacgatatcattctcttttaagttgatctccgccgggcttcccgcaccttcgatcacaatgatgtccgcctgctcctcaagcctgtggtacgccgcaagaatgtccggcaccagttttttcttataagcaaaataatccctggcactcatattcccgatcacttcgccgttcacaatcacctgggaaccaatgtcgttggttggctttaacaggatcggattcatcgctaccgtcggttccatccccgccgcttccgcctgcatcacctgcgcccgccccatctcaagcccttcttttgtgataaaggaatttaacgccatattctgtgatttaaagggtgccacccggtagccgtcctgccggaaaatgcggcagagtcctgccgcgatcaggctctttcccgcattcgacatggtcccctgtatcatgatgcgcattgccatagcttactccaatctaaaaaaatctccatgcctcaaatagcatggagattatactacatatccgcctcttttaccagtattttaagcttattccccgctctcatccaccacaatcggggtaatgacaatcttatccgccgcaatgttggtcttgcgttttacaatatcttccacctgtgcccgctttgcatccgtcacctctcccatatttaagacaacgtcgcagttatcttccgtgatgctcaccaccacatcggaaaatccctttgcctccagcagcatttccgcagctgcctcccgctcggcaatatccgtcatggcgatcatcttgttgacagcatcctgctttaaactctcatcgatcgtcgtattgtttacaatctcaagcagggattccttattcttggagcggatctgctcgcggtttaatttcatctccgccgcataatcgaggttcgcaatcgtcgtgcttgtaagcactgcctccccaggattctcgacgtccgcggcaccgtccgtcatctgtgccacatccccggactgcgcggcatccactgctgccgtctccgttccttccacaagcgccagttcctccccggttccctcatcggtaaagatctcctgctccgcaagcatatcctcctccgatatgtcgtatgtatcctgcaccgttcccgcatccgcgctcgcttccgccgtcacctggccatcttccatattgttgttcatgtagctgaaatatcctgccaccgcaatcataagtgccaatgctgttatcaccagctggtttttccgaaatattttcttcactccgattcctccctggaacacatcttaactactctaatcctatgcggttccacctttaataatgcctgcacggactctgaaatctcagaaaccgccgccgggttcccgcctccctctgcgaccaccacaacgcctgccaccgtcggcagcgtctctttctgtacatacggatatttttcatctgcagtctccacgtataccgtcgaatcttcccccgcctgttctgtcacactgcgctccccgcctccggaatcacgctcgcccgtcgaggaggaagttgtctttttgtccttctccacaatctgttcgcccccgtctgaaacggtaatcatgacgtccactctgcccaccccgtccatctgcatcagaatattctcgagcttcttctccagatattggacatattcctgctctccctcctccgatgtctggctgcctgacgccgtccctccactatctcctgacgccgttcttccgctgccgcctgacatctccttttctccctgtgccgtgttatatgccttttctgctgtgccatccccactctccaccggcagtgcaatcacaagcaataatatccccgccagcgcgagcagcagccagtcgcttttcttccagctgcgccagtttttgttctgtaagatccgtttcagtttttcaggcatttacgttcctcccacataactcacccgtattccggaatcctccatcccgtagtacgccgccagttcttcctttactttcccgcagacctcctgcccctccccggactctgccgcatctgacacgctgattcttccgaccgaaatctcatccgcgttctcatctgtgatgtaaatgcaaatctcctgcatcgtatgctcctcccccagttccaccgtaacgctctgggtgccaaacccgtactcctgcagcatatcatccaccttctccctgatattttccgcgatgacattctcatactctgtgcggtatctgtcctgattcagataagcgattttctgcgtatcgcgggaaaattccgacaatttttccatgcactgggcatatgccattttttcataaaacgtatcttttccgccaaacaatacaaacagcggtctcaatgctgcaagcaccatcagaagctgcgcgtaaaaacggatatatttccggtattgtttccccggcggcagataacttagcagcaccagaagcacaaacagaatgacaaatcctctcatatatgcgttcatggcacgtccccctatgcatgtgatgtgactgccgccgtctgcagcgcaatcgtcgcaaaaaacagtacaatgccatagcagaccagcttcagataaagcacgcctccctgcgccatgctcttaatgcatccgacaatcctcttatccgccaccggctccgccaccgccgccgcaagtttatagagaactgacatacaggcaagctttagaaccgggatgcagcccaccgcaagcagcacgatcagtgccgtcacccccacacagtttttgatcagtattccggcgccgaacataagctccccgattcctccaagcacattccccacccccggaatcatcatcgccgcacggctgaccgctccgtttaaaaggcggtcctttgccggtgcaagcagtccctgcatgacgtttaatccgagcaccgccatcatcgcgctcttcatcccccaggagatcactccagccaataattccgtaaaattctggaatttttcatcctcaaaaaagtgattgaacagctccgtcaccacatacacacggatgaagggaagcagcaccgaaagaaagagccactccaccagataaatgaccagaaacgccagctgataaaaggcggcggagctctccgcccccgaggaaaataccatgctgatgccaaacgccggaatgagtgccttcataaaatcgatgctgccgtttagcgcttcttccgctaccgttccatagatttcaaaagactttagcagcagcacacagagcacgccgtagaccagcaggaaacagatgtcggaaacataatttttctcaaaggttcccgagaaattcttaagcatggaaaaacccgctgcaagcagcaccacctccaccagaattgttttgccggtctttatctcatacagcagggcatcacacagccactgtccgattttttccatggaggtcactccgattccatccgcaagcagttcctgcaccatcacggagaagctgaatttttccctctgctccggaaacagctcctctttggtccacgtatccagttccgcaaagtccagatcttccagaaaagtttttaaatatgtctcctgcgtcttctccgcgctccccgtcccgccgtcataatctgtcgcctgcacagtcacaggcattccggtcaaaaccaaaaacatgcacaccagacagaagctcctctttccccactctctcataaaaaactccccaccgcgtccaaaaacgccccaaacacaggcacactcaccaccagaatggacagctttgcaaacatttcaatctggcctgcgatcgcagaataaccggaatccctgcacagattcgccgcaaactccgacacatacgtgattcccaccatctttaccaccagcccgatgtacctgctgtcaaccggaagctgcgacttgatggaatccacaaagagcagtacggtctccacctttgtgagcagatagataaaaatgcagattcccacaaccattgcaacaaacgtactgtactctcccttttctcttttgagcggaattgcaagaaatactcccgcgatgccaagaaccgctatttttacaatatccatcgttttctcccggcttacagcgcaaacagcgactgcatcgtctcaaataattcatagatatacggaacgatccagaacagcacaatgataagcccagccagactggtcaaaaacgcatgctcctccctgccgctgtgctttaagacctgtccgatcactgtcacaagaatcccgactgccgctatcttaaaaatcaaattcacgctcatcgtatttctttcctttctgttttgctttcctgccgtctaaatcagaagaatgacgagcattccccccatcaccatactgacagtcgcataaatcttctgcttttctccaagctctccccgcacggttttgatcctgtcatccagctgttctaaaatgagcgtaagtcttctgtgattttcttcttcgcttctcccgaaaagcgcgccgcccgcctccccgatgagcgcgctctcctctccggttaaacacagttttttccgatattcctcaaaaaccctcttccacacctgttccccgtttttctcgtttttctctatcaggcagtctgcaatcttccgacagatctcatttaatcgttcatccggcgttctcacaaagcatcccagcaaaacttccaccggctgtctggttccatttccgtaacaggaaagatccaccagaagtttccgcagcgcgtacaaaagtgccagatggtctgccagttctcttttgtatgtgcctgccatccccgccgccgcggcaaagaccatgatacttcccatgatttttaacatatccgctccatccgttcatcatagattgtggtgctgcgctccccgcgggaattccgttcaatcaatatgtagcgcccgaacagcttctgtgtgacgcatgcctgcagatacggtttgtccagaagctcctgcacacagcccgcatgcacggtcccgagtaccctgcacccgcagcacagtgcctgttttaccgccgcaaaatcctcctttccaccaagctcatccaccgccagaatctgcggcgacatggagcgcaggagcatccggattccctccgttttcttacagccgtccagcacatccgtgcgggggcccagatcgttctgcggaattcccaggtggcatgcggcaatctcggaacgctcgtccacaacccccactttcattccgggtgcacccgcatcccccgcggacaactgccggatcagatcccgcaaaaacgtcgtcttcccgattccgggcggcgagagcatcaatgtattgtagattccgtctgatctcctgatatgcggaagaatgtcatctgcgcagcctcgtttttcgtgtgcaatccggacatttaaaaacgtgatatggctaagaccggtcacttttccatccttttttaccacctgccccgccattccgattctgtgtcctccctcgatggtaagatagccctcctttacctcctcactgtaggcgtagagcgaataatcgctgatatagttgagcatctcacgaaggtcctccggcgtcatccgatagccgctctcatatccgcaggcagaaggcagtgcatacacgccctcccgccccggcagatagcggctctccccgccgtatataaattcaagcggactgcccacccggacacggatctcctccaatcccgccttccatgtatcgttcgccagcgcttctcttatatgcaccgggaatattttgacgatctccaaagccatgcctcctttccggctatgtctaattctatgacctgtccgaaaaaatatgactcctttttgcgtcggtcataaaaaagcgcaaaaaagaaggggcagcccgtttcatacggcagccccttcttttttatcaactcactaaataggttacatgcgctccggcgccttaaagccaagcagatcgatgcaggtctcaagcaccgacttcgtcagctctaacagacggatataagacttctggatctgctcgttctcctcggacatgatctttgtctcatgataaaagctgttgaatgcattcgccagctcataaatgtaagaacagatcttatgcggcgctgtctcctcataagcgttctccatcatggcaccaaatccggaaagtgccagcataaggttcttctcgcttgcggaatgagccgcctcaatcactgcgccgctctcatccttccccatgctgtgatacttgttcaaaatcgacttgatacgaacgatggtgtaaaggatgtatggtccggtatttccctcaaacgaggtaaaccggtcaatatcaaagatgtaatccttgcttgcctgattggagaggtcaccgtacttgatggctgcaagcgcgatcatcttcgcggtctccttcgcctcttcctcactgatctcaaggttctcttttgccttctggttctccgtgatctttttgagcatttcctcgttcacactctcaagcagatactgcagacgcataacgccgccctcacgggtcttaaacggcttgccgtccttgccgttcatcgtgccgaatccgaggaactttaagcctgtctctggctttaccagtccggtcttacgcgcgcagcggaacacctgtgtaaaatagagttcctggcgcttatccaccacatagatgagctcatccggatggtaatccttcatacgccacacgatcgttgcgagatccgtcgtattatagagggatgcaccgtctgattttaagatcatgcacggcgggatctccttggtatcggtatcctccttgacatccacgacaagcgcaccgtcgctgatgtaggcaaatccgtcatccttcatcttctgcaccatatccggaatgtacggctgggcatcggactcgcccttccacagatcaaacgatacgttcagattctcatagttgcgctttaagtccgtgacggacacatttaagatgtgggaaagcagtgcctgataacctcttcttccgtgctgcagttcataggttgcctgcatcgccgcctccttgtaggctgcgtcctccttggacttgccgctggctgtcggatagatctcctcaagctctgagatggtaaacggcgcctctgccggatactcgccggtataactctcatcaaaatataccagatccggctttctctcccgaagctccgtgatgataagtcccatctgtaagccccagtcgcccagatgcacatcaccgattaccgtatgtcccataaaacgtccgatgcgcttgatgctttcgccgatgatcgccgagcgcagatgtccgacgtgaagcggcttcgccacgttcggtccgccgtaatcgatcatgatcgtcttcggctctttggccttctcacagccgtatcttccctcatccgcctgcatcttcgccacataatccgccagatatgcctcatccagcttgaaattcaaaaatcccggctttacggattccaccatggaaaacatggcgttcccggaaagcttcgcagccacttcgtccgcgatcataaacggcgccttcctatattcctttgccgccgccatcgctccattgcactgatattcacagagatccggtctattggataatgtcaccttgccatactttgcatcgtaaccgcagtccacaaatgcctgtgtgacttccccggtgataaggtctaagatctttttcatattcttctctcctgcatttcgttcagactgtttctttacaacctgtatcacattataccataactaaaccatttctcaagcaaaacaacgcgaaaagatagcgccacccgtgacattctctcccattcatgctaaaatatttcccgtgcacgttccctataccggatttcgtccacaatacatcaaagaggaaaaaattatgaatccaaaaaacaacagaagttccttctcaggaaaaataggctttgtactctcagctgccggtgcctccgtaggtctcggaaacatctggagattcccatatcttgctgctaaatacggcgggggaatcttccttctcatttacattgtgttagccctcacgttcggctacaccatgatcgtcgcagaaagcgccctcgggcggatgacaagaaaaagtccggtcggtgcattccagtcattcgggaagaaaaaatggatgtccttcggcggatggattaacgccgtaatcccgatcctgatcgtcccttactactccgtgatcggcggatgggtgatcaaatacctgcttgaatacatccgcggagacggggctaagcttgcagaggacggttatttttccgcctttatctcagacggcgcatcgacggagctctgtttcgttctcttctgtatgtttacgctggttattatttttgcaggagtccgtaacggagtggaacgtgtttccaagcttatgatgccggttcttgtcgtactgtccgtgatcattgccgtttattctgtgacaagacctggagcgcttgccggcgtgaaatattttcttgtaccgaatccggcgaatttttcgtggatgaccgttgttgcagccatggggcagatgttttattcactctccatcgccatgggaatcttaattaccttcggttcttatatgaaaaaggaaacttccatcgagggatcgaccaagaacgtcgaaatttttgatactgccatcgcgattatggcaggacttatgattatccccgcggtatttgcattttcaggcggcgatccggacacgctgcaggcgggtccggcgctgatgttcatcacgattccaaaagtatttgccaatatgggactcggcactttcgttggtatcctgttctttctgctggtgctttttgccgctgtgacaagttcgattgcactgacagaaagcgcggtctctacctttgaggacgaacttggatggaaccgcaggaaatccaccgtcctggtcggcgtgatcatgattgcgctcggaagcctctcctccttaggttatggtccgttagcaaacatccggatcatcggcatgcagtttctggatttctttgattttctgaccaactccgtgatgatgccggtcgctgccttgatgacaagccttcttgtatccagggtaatcggaatcgatcgcatggaggaagaaatcctgcacggggaaggcaccttccgccggaaaaagatttttgttttgatgatcaaatacttatgcccggtttttaccatgatcattcttgcaagctcagttgccaatgcattcgggtggatttccatgtaactgcaggttacatatttcctatcacacaaaggaactgtcacaataagcatatcatgctttaataagcaataatattataagaaacgcacttgtggatttcatgtggaaatacagatggaaattcggttcaaaaaatgtggcatttctagccagcctgatgtctgcatcttcgatgatccgtgtttttccaagtttggagcactccgcgggtcatgtccgcatcccgggagacaatttgtaggacttttgtgccgcacttgcctgtactcccgcaataaaacataaccgcgcgaagccgatgtctgaattgccatctgccatatttttaatagcagatggcaacgagtttcggttcgcgcggttttatattgtctatgagggagtacaactagtgcggcttgtactataagcatgtagatacattatgtatgtatccgcatgcttatttttattataataaaaggcggataaggctagccttatccgccttttattataataaaaataagcatgcggatacatacataatgtatctacatgcttatagtacaagatgtaccggatcaaatttcaggacatagtagcggattggaagttgtcctgctgaataaattgcatgagtcatctgcggataaaatacgatcagatctcccggttccaatacataattctcttctcctgcctctacatacgccgttccctccaccatataaagaatctccacaaaataatgccaatgtggaagaattggaaacatttcagatgtctgtgcatcaaataaaaaggcttcatatggtttgtttaatttgtctgagtattcaaaataaggtttcacagattatctccatcatagatttttacaattttgtaatagattcattatatcatatcttttttctacatgatatactttcagcagaaaacatccagaaactatataattcgaaagacaggaggtttttaccaaaatgaaaattcaaaatcaacttggatatattaaaggaattacatttgccccatttcacaaacgtggttctctttctacacagactgcacgtgatagttttgattatatgatagaacacacggctgctgatttcgtaatccttgctcctgcagggctacaggagcacgcacactcagaagagatttgttacacttccagtgccacattctcagatgaagaattaatcaatatgatacgttatgcaaaaagcaagggcatccgtgttgccctgaaacctaccgttaattgtaaaaacggtgtctggcgcgcttacatcagtttctttgaaaaagatgttccatgtgaaccgaaatgggaaaactggtttgcctcttacacagaattccagacacactatgccaaaattgcagaagccgaacaatgtgatctttttattgcaggatgtgagatggtaatgacggaacaccgcagtgaagaatggagaaacgtaatcgctgcgatccgaaactattaccacggacctgtttcctataataccgataaatatcaggaagaaaatgtaacatggtgggattgtgtcgacatgatctcctccagcggatattatccgattgatcagtgggaacaggaacttgaccgtattgaaagggtcgttcagaagttcaagaaaccatttttcttcgctgaagcaggatgcatgtccagaaaaggttcctcaatggtgcctaacaactgggcaaatcagggagctttacgtctggaggaacaaccagactggtatcgagctatgttcgaggcctgcgcaaaacgctcatgggtcaatggttttgccatgtgggaatgggcaccggttcttccttccagaagtactgcggcaagagataccagctacgaaatctgcaacaaaccggtacaggaggttattaaagactactatgggagagacgaaagaaaataacatacaacaaacttcagaacaggatctctggcaggaagaagctgccatgatgcacatcttcagccggaacagaaaaaataacctgcgcacgcttctttctcttttcaagggacactatggcgcgctggctggttccgttttctttttcattatcaagcattccccaacctgggttcttccaatcgtcacagctaatattatcaatgcagtgacagaccacaacgggaatattaccaaaattctgattctgaataccatccttatgattgtatttctggtacagaacataccaaccaactacatccatacctggctctatgccaaaacggtacgaacagtagagaaagaattgcgcgaagccctagtctgcaagcttcagcaattgtcgatcacctatcacaaagaaatgcagtccggaaggcttcagtcgaagatcatgcgagatgtagaacagatacaaaatcttgcatctcagatctttatctctcttttgactatcattctgaacattggtgtatccttcggagtggtcatcttcaaaagtcggatcgtatttcttttcttcctctgcacgataccggtttctgttttgatcattgttggttttaaaggaaaaatcaaaacccataaccgtgctttccgtaaagaaatggaagaaacttctgcaaaagtaatggaaatggttgaaatgattcctgtaactaaagctcacgctctggaagatcaggaagcccgtaaaatgagtgaacagcttcgtaaagttgctgaaaaagggcttcagcttgatatgattcagacatacttttcttcaatcagctgggttgcatttcagatctttcaggtattctgtcttgcatttacagcctacattgcatggaaaggaatcatcggtgtcggagatatcaccttataccagacttatttttccagcatcgtcgctcagattgcaagtattgtgactttgctgccaatcattgcgaaaggcctggaatccgttgaatcgattggtgatgtgctttgtgcaaatgatattgaggacaaccgtaggaagaaaaaagtagttgatctgaaaggtgagattacatttcaggatgtatcttttacttataaaggcgatgaaaaaccggtattaagtcatctgaacttcaagattcagccgggggaaacagttgcctttgccggtggttccggctctggaaaaacaacaatcctcaatcttgccatcggtttcctgaaagctgacagcggacaggtattggttgatggaaatgacctgatggaactggatctgcacagctaccgaaagcagattgccgtcgttccacaacagtccattctcttcaccggaactctccgcgagaatatcacctatggatctgaatccatctccgaggaacagttatggaatgtcatccgtgcagccaacctggaagaagttgtccagaaactgcctgatggtctggacacgatgatcacagaacatggggaaaatctttccggcggacaacggcagcgcatctccattgcccgcgcatttttacggaatccgaagatcctgattctggatgaggcaacttctgcgcttgacagtatctctgaaaagaagattcaggattcaatccagaaacttgtgaaaggacgtaccacactgatcgtagcccaccgtctgtctaccattcgcaatgctgaccggattgctgtgattgaaaaaggaaatgttctggaatgtggctcttacgaagaattgatagagaaaaaaggcgcattttatcggatggagaaaatgtaaaaaatcagtagctggttagttcagaaacctgtctgcgggattgatctggaaagagtagaaagaaaatagctggacagatgcagaggcacagagcaacatactaaccttgattaaaaatacttgattttacagtgttttggggatgttacagtagatttttaccaacgatttaccaaagctatttgagtaggggataaactactcaggatcagcccgcatttgaaagaaggtgaccacaacgaaactgtttaagaaaaaaattcccgcacagacttatgataaagccagccaaaagccggtgattaaggcgagcatctgcaacggcgagcagattgccggtttcaaggatcttcatacgggcaagatcgaggaagtgatgctgattaaggggccggcggatctggaacggtttaagaaaatgtatggcattgaggatgagatcggaaaggagtattgatatggcgaaaaggaattgcgggaactaaacgaggagtatcgcagccgggagaacatggaagtatcggaagattacagataaaaagtatggacagccggaacatggagtaccggacataaggcagagcgcggcagggacagccgtgcatggcagaaagtaagggaagaacgccggcggaacatgcagagaggacagagatacgggatgaacagtatttttcacagaatcagcgttagaaaatatcagaacagggacgtggagcaggagaaaatcgagctgatgttaaaagcggcgatggcggctccgtccgcgtgcaatcagcagccgtgggaattttatgtggtgaaggacaaggcggtgatcgggcggctgtcagaggcttcgccctatgcaaaatgtgcgagggacgcgccggttgtgtttgtgccgtgcttccggtctaaggggattgcgccggaatattttaatatcgatatgagcgcagcggtggagaatcttctgctggaagcggacgaacttgggcttggcgcggtctggatgggaatatcgccggatgaaggtagaatgaaagcggtgcgggaagtgctggatattcccgaggatcttcatgcgttcgcgctgattccctgcggttacccggcagaggagagagcgcaggaagaccggtatgaggagagcagagtgcactatattatgaagtgatatgcaaatattccgagagcagaagatttgcaagcacagctgtcacgctaaaaaacggggctgcagggaaacgtttctctgcagccccgttttcgtgtattcatgaaaaaaaaaataaaaaacaaaaagcccgggcttgacgacacatcagcggtgcagctcctgacagcgtttccggtactcggacggtgtaacatccgcgacttcccggaagacccggttaaaatgtgtcagattggaaaacccggtttctctggcgacttcggtgacattccggtccgtttccatgaagagccgcttggcgttcatgatgcgggtctgcttgatatactccacgatcgtgcgcttggtacttttcttgaattcccggcagaggtaatattcgctgacataaaaacgctcggagaggtctttgagtgtgatatcttctgcgtaatggttatggatatactgaatcactttggtaacccgggtctcgcggaggatgccggtgctctcctgattcatgcgcagaagctgcaccataatcaggttcaaaagagactgcatacattcgtcgtggcagtccagatgcgaattctgctcctcttccatggcatagatgatgcgccgcagctggtgaagctcctgactgtcaggacggtaaaccacctgcgagtggagaagcttatgaagaagatccgccgaggtgatcgtctccgggcggaaatacagcaccgcccgcgaaaatgctatatcctggtcaccgtaggaacggtgcatcgtctgtggagggaagagaatacagtccccggcctgaagcttgaagagcttgtcatccatcagatgatagcgctccccgctgtcgagaaaatacagctcaaaataatcgtgatagtgagactgcgacatattgtcattgacgccggttacctgggcgatggcgcaggctgcaccggctgccatacttgtctgtgcaacatcaatcataaggcacctcatagaaaataaaaaactctgtttctatagaaattataaagcaaaaacgcaacaagtgcaagatatgtaaaaaaaagtgcaattttgaacaaagtctgtatagttattgaacctgatgttttgtaagatgatgacagaaggaaaacagatctgaatgaaccggatatagacaataagaaaaagagttacaaaaccaaaggaggaaaactcgtgaaagtatgttacaaagcaggtgctgtcacagcacagaatcattattattcgattgctgcagacgcagtggagattcgtgtatggttccttacggatgatatcatccgtatccgggcgggttttgatggggactgggatgaagcgtcctacagtctggtaacaaccgcgtgggaatcccgcacagatgaactgatgaaggattaccggaagcggattaacgtagcggaagctgcactggtggatggtgagaccaaggcagtgattaccggaaagaagctccgtgtggaagtggaaaaagatccattccgcatctgtgtctatgatgcagaaggaaccatgcttcatgcggatattccggagcttgcgtaccgtgaggattctaacaggcgccgcattcataccagccagatcgaggatgacgattatttttacggatttggtgaaaaaggcggcgagatcaataaagcagagaaatatatgaacatggctcccggagatgcgatgggatacaatgcgaaggagaccgattctctgtacaagcatattccgttctacatcaagctgcagcgcggcacgaaaaaagccgtcggatatttctaccacagcacggcagaatgtgacttcaatatgggacgcgagaagcggaattactggcaccgttattcttccttccgtgcggatgcaggagatgtggatttattcctgatcgcgggaccgtcgatcggggaggtcattgagcgctacaccgatctgacaggaaagtccgtacttcttccaaagtctgcattcggatacctgggatcgtcgatgtactatccggaactgccggaaaactgtgacgatgcaattctggacttcattgacaccaccagggaagagggcattccggtggatggtttccagctttcttccggatactgtgccgttgagacagagcaaggcatcaagagatgtagctttacatggaattataaaagattcaaggacccggcggactggtttgcaaagatgaagcaggcgggcatcgttgtctcaccgaatgtaaagccgggaatgcttctcgttcatccgcttttggaggagatgaaggaaaagaagatgttcgtcctcgacagcacaacggatgagccgggaatcggtacatggtggggtggaaccggaattttcgtcgactttaccaaagaagagaaccgcaagaactggaaagagtatctgaagcagggtctgatccagtatggctgcgagtctgtatggaacgataactgtgaatacgattccatggtagacaaggatgccagagtatattttgagggaaaaggcagcacgatcggtacgatgaagccggttatgagcaacctgatgtgccagctgtccaatgaagcggtgacggagtacaatccatcggttcgcccgttttccgtgtgccggtccggacatgccggaatccagcgatacgcgcaggtgtgggcaggcgataacctgacctgctgggatacgttaaaatacaatatcgcaaccattctcggaatgggactctccggagtcgcaaaccacggctgcgatgtcggaggtttctacggtgtttctccggaaccggaactttttgtccgctgggtgcagaacggtatctttatgccgagattttccattcactcgaccaacacggacaatacggtaacggaaccgtggatgtacacggacaagaagcagtatatccgggacgcaatcaagttccgctatcgcatgatcccgtatctgtattctctggagagcagagcgcatgagaccggtcttccgattatggagccgatgtttatggcatttcagaatgacccgaagacctacaatgaaggcgtggattttatgtggggcgattcccttctggtagctaatgttgtggaaaaaggggcggagaccagaagcatttacctgccgcagacgggggatgagaacgtccgcttctatgatttttataccagagaagagtatgcgccgggacagacgatcgaggtgccggtcgatatcagttccatcccgctttacatcaagagcggtgcgattattccgatggcggagaatcagatctacaacctgatgcatgagacggtaaccggacttcatattcttatggcgccggacgtagattctgaatttaccgtatatgacgatgacggaaagaccaatgagtaccagaacggggcatatcttaagaccaatattaaagtgacggcaggagtcagaacctgtgtggacttcacttatgaaggaaattatgagaataccgtggacacgatgtatctggatgtggtacacagggaaaaagcgccgttctatgttcagattgacggtgtggaagttccgcattttcttcacagacgcaaatttgaagaggcgcagaccggctggtattacagccagagcttaaagtcggtacaggtgaagtacccgaatccgaaaaaggatcatcatgtgatgatttcctttgaggtattcgatatgattggaatgtaatttaaattagaataaaaaaggaaaaggagaacaaaagcaatgaaaaagaacatcgccctcattttggcggcagcgctcgttctgccgaccgtaattgcggcaggcggctgtggcgcaaactccggagtttccagcagtgcagaggcaacggcagagaatccgatggtattgaccctggcacacggtctttccgagacgcacaccgtacatattgccatgacgcagtttgcggatgaggtaaaagagaagaccgacggacgcatcattatcaacattttcccgaacggacagcttggttctgagacagagaacttagagcagctgcaggcaggcgtaatcgcaatgaccaaggtttccgcaccgggtcttgccacctacaatgaagcctacaatacgttcggccttccgtacattttcaatgataccgaagacttctacgacattatggattcggaggacatgcaggatttcttcctttcttccgaggaagacggatttgtgacgatcacctacttcacatccggcgctcgttccttctataccaaggacaaggcaatccgtgtaccggaagatttaaagggattaaaaatccgtgtacaggatatgaagtcgcagacggatatgttgacggcgcttggcggaactccggtggcaatgtcctatggtgatgtttatacggctctttccaccggcattatcgatggtaccgagaacaatgagacggcattgaccacaggtaagcacggcgaggtctgcaaggtgtactctgttgaccagcacgcgatgattcctgacgtgatggtcatgtcagcaaaagtatggaacaatattgctccggaggatcaggaaatcatcctgcaatgtgcgcatgatgcgaccgaatggcacaaggaagcatgggatcaggctgtggatgaagcaattacggaagcggaagatatgggtgtggaatttgtctacgatgtagataaggaagctttccgtgaagcgacggcgggaatgatcgatgaataccgcgaagaatatccgggagttgcggatttgctggatagaattgatggaatcagagaagaggaggagtaaaaaatggctaagaccttaggcacgattaagaaatatatgaacaaagttctcgcggcttgctgcgcagtccttctgacgttcatgaccttcctggtattgtggcaggtatttaccagatacgtcctcaacagcccggcggcatttaccgaggaactggtaaagtactcgctgatctggaccggatttatcggcgcagcctatgcattttccaccagagagcatatggcgctgaccctggtaagagataaactgaccggaagaccgcatcagattctggttatcttcattgatgcgctgattctactccttgcaatctttgtaatcacgattggcggttataagctggcagtgtctgcaagggcggaattctccgcacttctgggagttccgagaacgctggtatattccatcgcaccgatttccggcatctttatcatcatcgcacagattattaatctctacgaagacattaccggaaacaaagtagaagaataaggagggaaaaaatgaatatcgtactaacaactatcattttgtttgtcgttttcggcgtactgctgttcatgggtgttccgatttctgtaagtattattatatcttccatcgtaactgcaatgtctaccctttcctgggatcagattacgtttattaccatgcagaagatgaattccggtatcgaaagtttttccctgctggcggttccgctgttcatcctcgccggtaacatcatgaacaatggcggtatcgcaaagaggcttgtcaattttgcacagcttttcgtgggaaaacttccgggcaacctggcacaggccaatattcttggaaacatgctctttggagcgctctccggttcttctgtagcggctgcatctgcaatgggtggatgtatcagtccgattgaaaaagagcaggagtatgatccggcttactcggcggcagccaacattgcttccgcaccgaccggacttctgattcctccgacctctgcattcatcgtttactctaccgtagccggcggcgtatccatttccacgctgtttatggctggatatgttccgggtatccttatgggactcggctgtatggtggttgcgttcatctatgcgaaaaaaatgggcatcaaggcgaccggccgtgacaaatccatcagtgttgcaaagacgatctgggatgccattccgtccctgctgctgatcattatcgttatcggcggtatcgtatccggtatctttacggcaacggaaggtgcaggtattgcagttctttactgccttatcctgtccatcatttacaagagtatcgatttcaagggatttatggagattctcctgaattctgccaagacttccggaatcatcctgtttttgatttctgcttcttctgcgatgtcattcgtgatggcttattccggaatcccggcagcaatcagcagtgcgctgctttcggtatccacaaacaaatatgtcatcttcattctgatgaacgttattctgctgatcatcggtatgttcatggacatcacaccggcaatcttgatttttacaccgatcttcctgccgattgcacagagctttggcatgagcgacatccagtttggcgtaatgttaattttcaatatgtgccttggaaatatcacaccgccggtaggctccgtactttttgtcggatgcggtatcggacatgtatcgattgaggaagtaactccgaagcttattccatatttcatggtactgattgtgatgctccttctggtaacctttgtaccgggactctccctcggagttccgagcctcatgggattagtctaaggatcgatctgtggaattgccgcaataagcatagaacttctttgctttgataagtaatattatcaaaagaccacaccgtgggatttcagatggaaatgcggatggatattcggttcaaaaaatgtggcatttctaaccagccgaatgtttgcatcctcgatgatccgtgtctttccaagtttggagcactccacggactgtgtccgcaaatcatgagacaatttaagaactttcgtgtggcgcttttgccgctgctgaataaaacataatcgcgcgaagccgatgtctgagttgccatctgccttattttcaatagcagatggcaatgagtttcggttcgcgcgattttataatgtctatgaagcagcggcattagccgccactagaaagttcgcccattgtctctgatttgtcggacacactccgggagtgttcaaacgtggaagagacacggaatccgatgcaaacattcagctggaagaaatgttcacatttttctccaacgaatattccatctgcatttccacatgaaatccccaagtgcgtttctcataatattacttatcaaagcaaagagcgatatgcttattgcggcagttcctttgtgtaagaggttatcttacaaagagatatgccgtgtaggcgacatacaataacacgcagacggcgccctccgcacggctcatggatcgtttggttctcgcgaaaacaaacagcaggataccgctgcagagcagcaggacgcagtcgatcactgattcgccgagcacatgaagcggcgagatggcagcggacatgccgaggataaacaggatattgaagagatttgatccgaccgcattgccgagcgccagaccgctgtccccttttctggttgccacgatcgaggtgacgagttccggcagggaagtgccaatggcgatgatggtcaatccgataaaattctggctgacaccgaagtttgcggcgatgatgcaggcgttgtcgacgaccagatcgccgccgaagatgacagcggcaagtccgccacccataaagaggatacttttcggaagcggcaataccttacagacctcgccttcttcacggttgcgcagggcggaacggatcatgcatgtgatgtagagaaccattcctgccagaagaagaaaaccttcgacgcggccaagcgttccatcgagaaacatgaggcacagaatcagcgtgaccagaatattgacgggcatgtcccgctttaagatctccgcgttcgtctgaaagccggacaaaaaggcgcagattccgaccacaaccagaccgttgaatatattcgatccgacgacattgctgatggcaatatcgttgctgccgccaagcgcagcgttgatgctgacggatgcctccggagcgctggttcccatggcaacgatcgtaagaccgatgatgacgctgggcacctttaagattttggcaagcgaggaacttccctccacaaagaaatccgcgcccttgactaagagtacaaaaccgatgagtaacaatacatattccatacgtgttcctttcctgcgacaaagaaatgggtataaaaaaagacctttatcgcatcaaaaatgagtgataaaagtctcgttacttacaataataaccggccttgcggcgtgatgacgattattatttcagcttctgcgcgcagcgtctggcgcatccgaagatgaaaactactcccttttattaaggttattttagagcggtgtaaaaaagatgtcaataaaaatgtcactatttgtcgaaattcaaacggaatccaagcagtatatcatacagacgtttttgcaagattatcgttgtaacaatcgatggatatgtctataataacagataacaaacggcaagagaacggagcgtgaggacacatgttttttattatgggaattacggacgggagaaaagattttgattttcaccagatgatgacctgcggtgcctgcgaagcttacggcagatatcaggtgttcatgacatacaccgtactttcgcttttctttatcccctgcataaaatggaacagacactactatgtgcaggcgagctgctgcaatgcgctctatgagctggacgcggagattggaaaacggattgcgtgcggcggggatgtcgagattctgccacaacatttgcgtccggtgcatccggggaatcgtggaaacggctggaataccacaaaacagtgcagaaattgtgggtttacgaccacggaggattatgaattctgtccgaaatgcggtctgcggttttgatagcggcaccgggatacggaatagaaagaggttacaaaggagagaacaatggagacatggtattatgaagtggtctcgatcgatggagactatgcgaacttaagaagaacggatatcccgtcagaagatctgaagcttgtggcgcgggcactgcttccagcggagatcatggagggaagcagattgaaatacgagcttatgcagtacgagattgtggaaggctagaggggcacggcgaaaaggagaaaaatacaatcaggagccatttcacattcagcatgtgctgacggtggaaccggtgcacgagctgaccgggctgatctgggcggcggcgctgcaatgagcggacggtaagccactttgcaggggggggaagcagattgttttcggaaattcgctgcaaacaccttgacagttctgattttttgaaatagaatctaaagcagcgcgaagaagagaagagtaccagtgcggcaccctacagagagagatgcatacggtggaagcatcttggaagaaagccctgggaagaccacctctgagcggccctaatccggtccggtgattccgttatcatcaaacgagtgatttcccgacagtgggatgcgtgatccgagaggatccggcagtccggcatggttttacgggaataagcagggtggaaccgcggatacagtatattcgtccctcatacaggcacaggtctgtatgggggatttttttcgtccggaaaaagcacccggacgcagaacaaggaggaagaaaatggtagattttaaagcagatgagagactgaacacactcaatcattcctgcgcgcatgtaatggcacaggcagtgaagcacttatacccggaagcaaagttctgggtaggcccggtcgtaaaggaaggattttattatgatatcgatcttggcgagaacgcagtcaacgacgacgtgatcgcagcgatcgaaaaagagatgaagaagatctgcaaagagggcaaaaagatctacagacgtgagatctcaaaggcagaggcattagagctttttaagaacgatgagtacaagctggatctgatcagcgatctggaggatggaacgatctccgtctacgaccagggcgattttacagatctctgccgcggaccgcacgtagacaatacaaagctctgcaagaattttaaactggtaaaatattccggcgtatactggaagggcgatgcgaacaatcacgtaatgcagcgtatttacggtgtatgtttcccgacagccgaggaactggaggcacatctgaagcttttggaggaggcaaaggagcgcgaccatagaaagatcggcaaggagatgcagctgtttatgtccgacgatctggtaggacgcggactgccgatgttccttccgaagggctataccgtatggcaggagcttgagaattatatcaaggcaaaagagagaaagctcggttatctgcacgttatgacaccgtgtgtcggcacggttggtctgtacaagacttctggtcactgggatcattataaggagaacatgttcccggcaatggaaatggagggagagtcctttgtccttcgtccgatgaactgcccgcaccacatgatgatctatgcaaacagaatgcactcctacaaagatctgccgatccgtatcggtgagatcgcacacgacttccgtttcgaggcgagcggtacgttaaagggtattgagagaggaagacatttctgccagaacgacgcgcacctgttcgtaacaccggagcagatcgagtctgagttcgccagcgtggtggctctgatttttgacacctacaaagacttcaatatcaccgattaccgctgtgtactgtccttaagagatccggcggacaaggtaaaatatcacgacgatgacgctatgtgggatatggcggagaatgcactccgaaaggtattaaacgatatcggcatcgagtatacagaggagatcggcgaggcggcattctacggcccgaagctggatgtcaacgtaaaaccggcaatcggcaacgaatacacgctttccacctgccagctggatttctgcctgccggcgaagttcaacctgacctacattgacagtgacggaacgaagaagacaccggtcgttcttcacagagcaatccttggttccctggatcgtttcatggcttacattctggaggagacgaaaggcaacctgccgctctggctcgcaccggtacaggcaaagatccttccggtcaagaatgaggatgaggagttgaatgcatattctcacgaggtatacaaataccttgaggataacggaatccgtgtggagatcgatgagagaaacgagaagctgggctatcggatcagagaggcacagatggaaaaagttccgtatcttctggttctcggcaagaacgaagtggcagaccggacggtaagctacagacttcacggagagcagcagtctacgacggtatccatggaagacttcctcgccatgttgcaggaggatatccgcacgaagaaactgaatccggctgccgcaaaataaatcattatacggcggagagcgattggctctccgccgttttacttgaacttgagatcatttaatagtataatcactacgatcaataaaataagaatatgtgcaagaatagataggaggaatctattatggttacctggaacaacttggatacccttgcttcttttcaggagctttccaaagtggaacgcgtgaatcttgtcgaggcaatgtccggagagaacggtgctgaccgtgtgaagaattacagtgtgccgatggctggcggattttcttacaactatgcagccaagcaggtggatgataaggtgcttgcagcacttgtaaagctggctgaggaagcacagcttgcggagaagtttgaggcactttacaatggtgaggtgatcaacactggtgagaagcgtctggtgcttcatcacatgacacgcggacagctcggtgatgctgtgacggcagacggtgtggataagcgcaacttctatgtagagcagcaggagagaatcgctgattttgccaacaaggtacattccggcgagatcaccaatgcggcaggagaaaagttcacaacagttgttcagatcggtatcggtggtagtgacctcggtccgcgtgcgatgtatctggcacttgagaactgggcgaagaaaaacggcaagttcaagatggaagcaaagttcatcagcaacgtagacccggatgatgctgcagcagtgctgaattccaccgatgtggcacattccattttcgtactggtatccaagtccggtacgacactggagactctgacgaacgagtctttcgtaaaagatgcattaaagaaagcgggactggatccgtccaagcatatgatcgctgtaacgagcgagacatccccgttagcgaagagtgatgattaccttgcagcattctttatggatgactatatcggaggacgtttctcctccacttccgcagttggcggcgccgtattatccctggcattcggaccggatgtgttcgcacagttcctcgagggagctgctgcagaggatcagctttccgcaaacaaagacgtattgaagaatccggagatgctcgatgcactgatcggcgtttacgagcgcaacgtactgggctatccggctacggcagtgcttccgtactcccaggcactcagccgcttcccggcacatttacagcagcttgatatggagtccaacggtaagtcggtgaaccgtttcggtgagccggtagactacccgacaggaccggtgatcttcggcgagcctggcacgaacggacagcattcgttctaccagctgctgcatcagggcacagacatcgtaccgcttcagtttgtcggctttaagaacagccagatcggcacagatgttgtgatccaggacagcacaagccagcagaagctctgcgcaaatgtcgcagctcagatcgtggcattcgcatgcggcaaatccgatgagaaccgcaacaagaatttcgagggcggacgtccatccagcatcatcatcggtgagcaggtaaacccacagtctctcggagcacttctggcacactttgagaacaagatcatgttccagggcttcctgtggaatgtgaacagctttgaccaggaaggcgtacagcttggaaaggttctggcaaagcgcgtgcttgcacatgagaccgacggcgccctgaaggtattcagcgatctgttaaacatttaatataacgaaaagaactgtgtcacgtcctgcggcagatgtgcggcgtacacagttctttttttgttcgttgggaaggtttggcatattgggtgcagttcctgccaacgtattttgtcgcaaaatttcatttttctaacacgcatgccccggccatcagcgatgattcttgtctttttgaggttcgacagtgcgccacggatgttcgcggacacccgcggcgcacagtcgaacgccaaaagagacaggaaaatggatgaccggggcatgcatgaagaaaaatagaaattttgttccaaagaattcattgacaggaaccgcatccaatatggcggcggacttctgcagaaataaaaaagaaccgtgtacgccggggcactgccgctggacgtacacgattcttttttgctataaaaatgttttcagaacctgaaggactccattctcccagtagggcgcacaggtatcttttgccgcggcgatgacttcctctctggcgttggcgacggcatagctcctgccggcgttctgcagcatctcgatgtcgttcaggttatccccgaacgtgcaggtctcttccggtgaaatgccgaaatgcttctgcacgaactcgatcgcagtgcctttatttgcaccaagcggattgcagtccatccactctttgccggcggcggcaagctgtgccttgtctttccatgccggggtaaagagcggcgcacacatttcctcgcaggcggatttgtggtagacggtgaacttgatgatgtcctgttccgggatgtcagctaggcgctcggcctctctgatatcgtagccgtaggaatcgcgcagccagtggaacatgcggcttccggcatcctcggcgagacagtagtccggggtagcgacaaaacaatcacagtgcggcatctgttcctgcaccatgcggcacatgccactccagacatcgcgcggcatcgtgtgaaccatcagaatctcctgtggggtgcgcacgaccgtgccgccgtccgtgatgtagagcagctgatctttgatcggcgcaaacagcttccgctcgctgatgaactgtttgccggagcagacggcaaaaatgattcctttctggacaagttccttaatgacagtcatatattcgggatcgatctgcatcgttccgtcttttaccagtgtcccgtcgacatcggtggcaatcagttttatcatgggattctccgtttcatggcgtctgttgcgccttccgtaatcatacataaatgcatagctgtattataacgttgggaagtgtattttgtaaatgccaacggttgtcagtgggatttatttttgaatacagataggttattgaataagcatttatggaatggtagaatggcagtgataaattggaactggtggagaagaaaatcaatgagaatagaaacgaaacgtttcgtgattggggacttagaaagaaatgattcctttataggaattgttggcatgagggtggaagatacattgaaaatttccagttataggaggtggtaatatgtggttctggtggtttattttgatatgtgattgtattattccagcggttatgataattgcaggcagaatgatgtggaaacattgcccaaagaaaatcaatggagtagtgggatatagaaccaggatgtcaatgataaatatggatacttggaaatttgcacatgaatatgcaggaaaactctggtggaaagctggagttggcctgttgggtcctacattgctgatacatattcctttctatggagcaagtgacaatacaatgggaatactaagtattattatcactgtaatacaactgctttttttgattgggtctattttatcaacggaaaaggcattaaaatgcaattttaatcaggatggaacaaggcaataggacaacaagtaaaaccaacacgttgcaaaatgtgtggcaatcaattacaattttatctgggtcatcttaggatgacatacacgaaagaaacagggcatttccggaaaagcggggaatgacttgataaggagagaaacatggcggttggattatgtcacagcgacaaaaaggcggtctgcagaaatctgcagtacagtgagaatgtaaatatgccggacagccccggatggaaatgggtgcagacggtacagacggaaacggcggaccgttatctgatccggctcaaaagcagggaggaaggaagagcgcgcaagacgtaccgcgtggaagtgaaggaagatacagtggatgcaaagagtgcgcccaatgtgacacagattgtgcttctgctactgttgcttccgctgttggggattatttttgcgggactccgctacagcttaacctcgttaaatccgcaggacgatctgcagctggtgctgatacttaccgtgattgccgcgatacttgggcttagaatctggctgatacagcggaaggcggataaaacgctccgctattttctcatgacgcggatcatcaatgcgccgggaaataggaacggggcatatgcgggtgccgcgcagcgcaccgcagaccagacctggggacggacggcatatgcagaagacgcggcatatgccggggacgcagcatacgcaggagaagacattgccggttcggtggagatggaagaaccggaagagcgggtctgggtggcggagtggcacttgtcggaggcgtaccggcgttacagccgcctgcaggcaatcccacttgcggcacttgcactggggggaatcatatttttgtacgcgattgcgtaccggtttaacacgtcccatgacactgcacgcacgatgcttctgatgggagaggcggggctttatatgacattgctcgcccttttgagcaaggtgatgcagtaccgctatctgaagaaagcaaaagcgcaggcaaagcgttatcacgccagaattgcccgcgtcataacaaccgggaaaaatggcgcgaccaaatattatctgtatgagttcatggatgaactggggcgaaagtgcgaggcgcgtgccatgtatccggtacggcaggcaaatgtgggaaatgtgcaggatatggttggcggaaaagcagatatctggtttgatggtgcgcatcttccatatgcattttcagaaaaagacggagcgccggatatccagatgaagcttcggaatctgattgcgggtactgtggcggcagtggttgtgatcgcgctcatgtttgtgtatgcaggaaaccactatgtggcttacaaccaggatgccgacagtctgctgatctcttatgattcccaaaaggcggagtcggatctgacgtttgaggacgtgaaggacgacccgactgtgcgctggatcatagatgcttacgcgatctatgtaccgtttgagaacggagaatatggcgaactgggcggtcattctagagaagactgggatcaggagcaggtgaaggaatatctgtctgactggtggggcattacgagccgggcaacggcgacccgcacgatcagccagatgctgaaaaaaggaaccagagcgtcttaccgtcatgcgtttgaaacttacctgaaaaaagggtatctgtcgatggatgaggatggctatgtcgatattataagcatcagtgagatcccggaggatgagcagtgccggacatgggtatgctatgatgcgtatggacatctggacacgcgcggtgtggatgcttgggattatgtccgtattatgcgcatcacgggactgtgctatcagtgcggctacatcagcctcgaggagtgcctcgaccagtgtctgccgattgcgcagagactgcagaaggaatatggaagctttgaggagatttttgaaagctacatctatggatatcaattctggaaaaatgacagcgatgacgacaggatctatttttaccggagggcggcgggagaagccgtcgaaaatattcagtcggagtacaatacagaactggtaaaagactgggagtaggagagaaggatggaacaggagacacagacaccgcacaagcggcgggtgcgttacaagggaaaatacccgaagaagtttgaggaaaaatataaggaactacagccggagaaatatcaggatacgatcgagcatgtgatccggaagggaaatacgccggcgggaatgcatatctcgattatggtaaaagaaattctggactttttgcagattgagcccggagagcagggatttgatgcgacgctcggctacggcgggcacacgcgtgccatgctggaatgtctgaaaggacagggacatatctgggcgaccgatgtggacccggaggagtccgccaagacgaaaaagcgtctggaggatctgggattcggggaggatcttttgacggtgcgccttcagaatttctgcacgatcgatgagatcgcaaaagaggtcggcggcttcgactttattctggcggatcttggcgtgtcgtccatgcagatcgacaatccgaagcgcggcttctcgtttaaggtggatggaccgctggatctcaggctcaatcaggagacggggatcagcgcggcggagcggctggatacgatcacgcgggaggaacttgccgggatgctctatgagaactccgacgagccgtactgtgaggagctggcaaaagcaatcacggacgagatccgcaggggcagccacatcgacacgacgacaaagctgcgcagggtgatcgaggatacgctggattttctgccggagaaggagaaaaaggacacaatcaaaaagacctgccaacgcacattccaggcactgcgcatcgatgtgaaccaggagtttgaggtgctgtatgaattcatggaaaagcttccgggagcattaagaccgggcgggcgcgtggcaattcttaccttccactcgggagaggacaagcttgtgaagcaggcgctcaaagagggatataagagtgggatttacagcgactatgcgaaggacgtcatccgtccgtcggcgcaggagtgcgctgcaaacggaagggcgcgttccaccaaaatgcgctgggcagtcaaggcataagaaaaaggacatcatcggagcaaaaaatccggtgttgtccttttttggtactcaaaaagtacaagtgccatacagacgaaagttgtattgtaactgtaatagaaagtagacaaacattgtggcgaaagtggaaataaggtacaaaaccgccggataaaacagtggaaatatggcgcgatatatggtaaaacgcacaatagatacaaaataattgcaaaaaagtatgacaaaacacacacaaaaccatacaacttttagaaaaaacttggttgtattttcttgaggaaaaagcagggagtatctataataaaatcacaaaaggtttttacacaacccaaataaaatgtatagggaggaaaaagcatgaaattgaaaacaattttcaagaaggtgacagctgccgcgctggcagcgaccatggttgtgggtatggcggcctgtggatcgggttccgagacggcgagcagttctgactcggcagcgtcttcatccggtacggaggcagcggcaacaccggcagtgacagacaactccaagattaagatcggagtttccatctggtcatccaccgatgttctcggttcccagtgtaagttgattcttgatgcagcggctgatgctcttggggtggaggttcagtacgtggatcagggtcacgtatccgagaaggttacagcatctgtggagcagctggtagcagcaggatgccagggtattatcatctgtaactcatccgatacagagatgacatccgcaattaagacatgtaacgacaacggcgtatatctggcacagttcttccgtattatcagcgagacgaacagcgcagacatttatcaggcagcaaaagattctgcttattacatcggagcagtacatgaggatgagccggcaaacggtgaagctcttgtaaacatccttcttgataagggtgaccgtgacatcggtctgatcggctgggagcagggagatgcaacctggcttggaagatgggaaggctacaaagcaggcgttgacaagtggaacgaggcacatccggatgatccggcacagctttctgagccgcagtacgcaggtacaacttccgaaggtggttccaaggcagcagaggctcttatggcagcagatccgaacctggatgcactcatcccggcaggcggcggcggtgaccctcttcagggtgcaatcgcagcagtagagcgtgcaggcaagacccaggatatcgatatcgtatctacagatttccttccggatcttggagacagactggagaacggctccatggctggtgagtctggcggacattactgtgatccgttaattgcattcatgatggtttacaacgcaataaagggcaactacacaggatttgcaggcaacttcgaggacgtttccttcccgtacctgtatgtatcctctgcagaagactatcaggcatatgagaagtatttcgtagaccagcttccgtacacatccgatgagcttgttgagatgtccaatcttgacttaagcgctctgaaagaagcagcaaagaatatttctattgaagatgcagcatcacgtgcagggaattagttccaaagactgagcgttacttcaaaaggtcggtgtcgcgtggcgataccggccttttgtatgaaaggatggctcacacagcgtgacatccgttgattcgagtaagaaaaagaggtagataatatgggttcaaaaaagctgtcgggaagcgcaaagggctatctgattcttctgtcgctggttgtggtttcctgggtaatctttaaaatactgacaccgcataattttggctcgccggccaatatgctcaactactttcaggccagcctgattgcaactgtgggtgcggtcggattctatttcgtcatggttatgggaatgttcgacttctccattggtgccaacatcatgctttctgcaatcgtgggatgcgtgtttgccacccggtttaacatggggtacctcggactgatcttgggctgtgtgctcaccggcacgatcgtcggtctgttaaacggtctgttttatgtaaaattgagaattccgtcgatgattgttacaacgggtctcgcattgatttatgagtcacttgcgaactatatcgcaggcggcgtggagcagacgcttccgtcaaatctgcgcgcattcggtcagatgccgtgggatattatcctggcgattgttgcgtgcattgtagcatatatctttttgaattatacgaaaatcggaacttacacctatgcaatcggaagcaacgagttcgttgccaagaacatgggtatcaatgtcaataaatacaaggtgcttgcatttgtgttaagcggcgcgttcttgggagttatggcgatcttaaccatcagctacggttcctccatggtggcggtaaccggtatggcgtccatgagtcgtaactttgtaccgacgatgggatgcttcttcggactggcgttcaagaaatacggtatgccgctgcaggcgattgtgatcggtgagttcgtcatcaacatcattttcttcggattcatcgcacttggcgccccgaccgcgattcaggacgtcatcacaggtctggcactgcttatcatcatcaccgtgaccaccaaagtcacaaaaggtgaaattgtcaagtaatcgaggaggagaatgcaatgagtgaagtcagattacaggtaaaaaatctttgcaagtccttcggtattacgaaggcagtacagaatgtttcctttaatgtcaacaagggagaggttcacgcgctgatcggggagaacggttccggaaaatcaacgctgacaaacatgctgaccggtatttacagcatcggaagcggaacctttatcctcgacggaaaagagattcatccaaagaatcaggtggaagcgaacaatgagggcgtttccattatcgtacaggagctgggaaccttgtccggacttacggtcgcggaaaatattttcctgggacacgaggaacagttcgtacatttcggaatcaaaaataccaaagccatgaaccgcaaggcaacggaattacttaagaaatacggatttgaccggatcaaggcatccgacatcatcgataattataatttcgaggaccgcaagctggtagagatcgtaaaagcgacatacttcgatccgaagatcgttgtcgtggacgagacgacgaccgcattgtcccaggagggacgcgatgaactctacaagcacatggaccgtatccgcaacagcggaaactccgtaattttcatttcacatgacctgccggaggttctggagaaatccgataccatcacgatcctgcgcgacggcatctacattgataccgtaaagagtgcggatgtgaccgaggatgatctcaagcgtctgatggttggacgtgaggtgaccggtgattactatcgtgccgattacggagagaaagtctcggatgaggttgtgctttccgtgaaaaacgtgacggtgccgggcatcatcagcgatatcagctttgatcttcacaaaggtgagatgcttggtttcggcggattgtccgaatccggaatgcacgaggtcggaaaagcgattttcggcgcatcctacgacagagagggcacggtgacgctggcggacggaacacagatcaacgatattccgacagcaatcaagcacagcattgcttacacgtccaaggatcgtgacaacgagtccgtggtcatgaaccagagcatcggcgacaatatctgcctgccgtccctggatgaactgtcgaacaaggcacatttcatcagcgataagaaaaaaaagaaatttgcaaacaaatatgccaagcagatgtcggtaaagatggtcaatacggatcagttcgtgtcggatctctccggcggtaacaagcagaaggtggtactggcgcgctggatcggtaaggattcggacatcatcgtcttagacagcccgacgcgaggcattgatatcaaggtaaagcaggacatctaccagctcatgaaccagatgagaaaagagggcaaatccatcatcatgatctcggaggagctgatggagctgatcggtatgtgcgaccgtatcattattatgaaagatggcaagatcaacggcgaactggagcgtaatcaggatcttaatgagaacagtctgattacgatgatggtataaggaggcagtcatggagaatcaagcaaagacgaacacagaacaaaaagagcagcagctcaaaaaattatccaagatgtcgttgattcgttcacttctgccggtggtgggactggtcgtgatcttccttctgttcaatgtactgacgaatttcagaatggttggaaatctgtcactggtactttcccaggtatatgtgacgatgatagcggcaacaggcgttttctttattatgacaatgggcggtctcgatttttcacagggatcgattttgggaattgcatccatcgttgtgtgtatgctttccaagatcagcattccgttagcaatcgtgggaggaatcgcggcaggcgcggcgatcggagcattgaacggttacttttatgtataccgcaagatcaagtcgtttatcgttacgatctgtaccatgttcttattccgtggatttatcaaatatctgaccaccaatgcacccgtggcaggttccgcaaagctcattaactacgacagcacagcgcttaaaatgacgctcacgattattgtggtggtaatcggattcatcgcattccgcttcacgaagttcggaacctatttaaaggcaatcggagcaggagaaaaagcggcaatgttttcgggtatccgcaccgaccgcatgaagtttttgatctacgttctggcaggagcgatcaccggatttgcggcatttatcaacgtcatcaaagtcggatcggtaacatcttccggcggtaaccagttggagacacagatcctcattgcactggtactcggcggtatgccgatctccggcggagcaaaagtccggtttgagaatatcatcgtagggtcactgctctacatcgtgctcagcagcggactgaccatgatgggattcacgacacagatgatgcagttgattcagggtgtcgtattcctgatattcgtggcagtattcgcggatcgccagtcattgcaggtaatcaagtaacaccgcaggggcttggagagacaatcggacagcagagttgcagcaggaagcgggggaacagaaatgtcaaaaaaaatcggtgagcagagtctgttaaaatatgagaaattgtacaactggggcagaactttaatcacgagcggagtgattcagaatgaggacaaatttccgtcggagaacattctgcagaaaaagttcgggtattccagacagacggtgcgcactgcgctaaatcagcttgaagcagagggtctgatcaagagagtcaaggggagcggcacatatgtatcgtatgaaggcaacttgagaaacggagagagaccgcgcatcggcttgattttaagctatttttctgactatctgttcccccgcgtttatgatggaatcgattctgttatgaaggaagccggatatgacatcgatgtagccgtcacaaagaaccggctgaacgatgaggcgatttatctggaaggtctgctcaacggcaatgtggcaggatttattattgaaggaacacgctcctttttcccgaatccgaatatccgtctctacgaggagatccggaagaggaacattccgacgctgtttattcacaatcattattccaatcagcgttttgacagtgtggagatgtcggacgcccgcgccgcctacaagctgaccgaaattctgattcagaacggacaccgcaggatcgcgggaattttcaagtatgatgatatgcagggaatcgagcgctataaagggtttgtggaatgtctgtcggattacggggtaaagtttgacgacgactggatccgctggtactccacgaaggatatggaggagaaactcagcaaaaagggacttctccggatgtatcgccgcacgaaagactgcacggcgatgattgtatacaacgatgaggtcgccggctattacatggagtttcttgaggaacgtggactgcacgtgccggaagatgtatcgctggtgtcctttgacgatgaggagctgcagcaggatgcgagggtcaaggtgctgtcggtggttcacccgaagtacaatctaggcaggattaccgggaaaaatctgctgcgcatgatggatgatccggactggcagaacaagaattattcctaccgttttccggtcagcatcaacgacgggaattcagtaaaagatatccggtgaaaaatatcatatccgctgacatgcgaaaacggtcggcggtatgtttgaaaagaaatgtttcggtgcacactatgcattgatgttacatctgttttgtgatatgctgtctcttatgacaaaaaggcggtatatcacaatttctattttagagagggagaagcgattatgtgtacagcagcaacctatcggacgaaggatttctattttggaagaacactggattatgaattttcctacggtgaggagatcgtcatcacaccgcggaattatgaatttaacttccggcatatgggacaggcaaaagagcattatgccatcatcggcatggcgcatgtggcgggggactatccgctgtattatgatgctatcaacgagaagggaattggcatggcaggactgaacttcgttggaaatgccgtctacgcagaggtgactgagggaaaagagaatgtggcttcatttgagttcatcccgtggatgctccgccaatgcgcgacgatggatgaggtgcgggcgctccttgcaaaaataaatctggtcggaaccccgttcgccgagcagttcccggcgtcacagctgcactggatcatcgcagacgaaaatgaggcaatcacggtggagtcggtggcggatggtctgcacgtctacgagaatccggtgggcgttcttacgaacaatccaccgtttgcacagcagatgtttatgctcaacaactatatcggactgtccccgaagcagccggagaattctttcgcaaaagatgttccgcttagcacctacagccgcggaatgggtgcgctgggacttccgggagatctctcttccgcgtcccgttttgcgcgcgtggcgttcacgaggatgaatgcggtttccggcaattcggagacggagagtgtcagtcagtttttccatattttaggatcggtggatcagcagagaggctgctgcgaagtggcggaaggaaaatacgagattacgatttatacgtcctgctgtaatgcgaccagaggaatctactattacacgacctatgacaatcaccggatcatgggcgtggacatgcatgcggaagatctcgacggaacaacgctcacctgctatccgatgatcgaggaaggtcaggtgagctggcagaacggacagaattaagactgcggtgagaaaaatgcgacggcgatggcgccgggaccgacatgggttccgatcgtcgcaccgagggagcagaccgggagctggtccgtgtgtccgctccagagtgcttcgctgtctttgatatatttttgcagcatctcatcgctgagtccggtgtaaccgaggcagaagggtcgggtaaaatcgattccgtctgccttttctatttccttcatgagaaaattattcccgtttttggagccacgcgccttgccgagcatgatgatctcgccttccgatacggcaacgaccggcttgatcgccatggcgccgccgagaaatgcggtggcagcggagatgcggccgccttttttcaaatattccagcgtatccaggacaccgagagtgtggatctgctccttggaggcttctaagattccgacaatttctttggctgataatccctgatcttttaacagaagcgcatacttgaccagaatgccctcgccgatggtggcgttatagctgtcgatgacaaaaacttttcctgcaaaatcttctgccgcgatcgtggcactctggtaagtgccggagagacggctagagatcgtgattgcaatgacggtctccccgtccgccaccgccctggcatatacctcttcaaaagcggcgggggataccaggctggtcgtgggaagagtgtcgctctcaatcagcttttcgtagaattcgtgatggctgattgtgacgccgtcgaggtattccgtatcgccgaagcggatcgcaagcggcagaatggtgaggtcttctctggtagaagcagagagatcggatgctgagtctgtgataattctgattttttccataagattctccatatatttttatttttgctgattgtgtttggtcagatagtcagacaggttttcactgatgattgcaagagtgccatagaaatcgcggcgcctttcctccgtcagcccgcgtccaccgtaggagagcgcttctttgatgcgtgtctggatgccgcttacaacggagcacccttgaacggtaagcatgtagtgcgaccggtaggatcgcttgtgatcttccggctgctcgcagacgacaagctgccggtcgctaagctgtgagagacagcgggagacggcggctttgtcctccttgcagagttctgtgagctgcgttgcggtcagcccctccgggtgctgtcccagataatagagacacatggtgtgactggccttcagcccgaactgtttcatctccagctctttgattttctgtaaataccggttcaactccaggatggagagtgaaaaggtttcaaaacgatgatccatgggcgctcctttgcaagatgttgataaatcaatatctcggattatagcgcaaagatgttgataagtcaacatctttgcgtgaagatataaatgggatagttgcggaaggataacagaaatgtaaagagtggatatgaaaaaaatatgatataatgttcgcgaaggcaaaagtgagcatggaataaagacggacgtgcatgcttgcatgtgtcggacggatatgttccatgtgaacgcgcccgcgggtccgggaaaccagaggttttccggacttttgccgaagcaaagacgcatatgatataatgcttgtaatagcacaataaaatgatatacaagcggcaaacagaaaaggagcacttttatgcagatcagacatgcaggtacacaggacattccggggattgaccggctcctgtcacaggtattaacggttcatcataacggacggccggatttattccgggcaaatgccagaaaatacaacgatgacgaattaaaggaaattttagaggatacgacgcgcccggtttttgttgcggatgacggagcgggcaatatcttaggctacgcattctgcgttttccagcagcacatcaatgacaatatcttaacggacatcaagagcctctatattgacgatctgtgtgtggatgagaactgcagaggacagcatatcgggcagcagttgtaccggtatgtgctggattatgcgaaggcgtccggctgttacaatgtgaccctcaatgtctgggcatgcaatgaaaatgcgcggaagttctacgagaagtgtgggctcgtgccgcagaagatcgggatggaaaagatactgtaatccgggagacaggaggaaaatatgggattttttatagcgatgtttttatgtaatctattgatgccttctattatggtgatagcgggttactgcatgtacaaaaatcctccaaaagagataaacgggctgatcggctatagaactgccatgtccgaaaagaataaggatacctgggcatttgcgcatgactgttgcggaaagttatggatcaaatcaggcatcatattgctggtgccgacggttctcgctcaaatcccgtttgcaaaatcgggtgaagatgtagtagggacagtaacgcttgtcatcgaagcggttcaggttttggttctgattggtactgttattcttgtggaaaaagcgttgaagcgcacgtttgacgaaaatggcaacaggcgcggatagagtaagagacgcagctgaaagagaggggagatatatgaaagcagatgaagttataagccgggttgcggatctttgcagagagcatggtgcgaaaaaagtgattttatatggatcgcgggcaaaagggacagccggggaacgcagtgacatagatattgcggtgtccggcggggctgattttgatgagctgcttgaaaaagtcgaagaactgccgaccttgtacagtgttgatttattaaatatggatacctgtaggaatgatttattgatggaggatataaaacaatatggacgcgaaatttgacagacggtttcaatcattttgcaattcgctggatgctttggcggaggccagggaaagagatcttacggattcctttgtattaagcggaaccagtgcaaaatttagtattacttttgatttatcgtggaaggtaatgaaggacatattggtacagtattatgcaataacaggattcgttacaggttctccaagggatgttctgcgtgaagcatttaaggcaaacttgatttcggatgatgcatggatggacatgctcaaagtaagaaatgaactcgcacatgattacgatagtgagattgtgaaaacacattgtaacacaattgtgaaagagtatattgcttcccagccggatcatattttgtcaatattatgagagggtaattagaagatgtacatatttttgctaatcttaatttatatcgcttttatcagccttggcttaccggattcacttctgggatccggctggccggtgatgcataccgaactcggcgtgccggtgtcctatatgggcatcgtatctatggttatctctggcggaacaattatctcgagtcttctttctgataagctgaccagaaaattcggcacgagaatcgtaaccgttgccagtgtttttcttacggtcattgcgctgttcggcttttctttttccggccggttctggatgctgattgtttttgctgttccttacgggctgggagcgggagccattgacgtagcacttaacaactatatcgcgcttcattataaagcgaagcatatgagctggctgcattgcttctggggcgtcggtaccatcgtcagtccgttcattatgagctatgcattggcaaacaggacatggaacagcggttatcgcatggttgggctgatacagcttggcattgcactgcttctgcttgttactctgccggtatggaatgtgaaccagagtacatcccgggaggacggaaaaagtgtaggcctaaccggtgcgcttaagatcaaaggggttccgtttcttttgcttggatttttcgcttactgtgctgcagaagctacgactatgcagtgggcaagtacctattttgttgaggtaaaagggattgctgcagaccgtgcggccggttttgccgcgctgttctatatagggattactgccggaagattcatcagcggaatcattaccgatcggcttggcgaccgtaaaatgattttgctgggaaccggtattcttgtctgcgggatttttatcctgtgccttccggtgaagtcctatacggtcgcgtttgcagcttttcttgtgataggtctggggtgtgcgcctatttacccgtgcattatccattccacaccatataatttcggggcggaaaattcgggagcgattattggaatccagatggcaagcgcttatgtcggttcgacgtttattccgccgctgttcggactcctcggcaatgcggtatctttttccatcctgccggtctatctgctggggtttgttgtcctgatgattacgatggtggagacaacattccgcattacccgcaaggaaaaagttgtaaaaatgtaacagatgtgtatgatagaaatcagagagtcacacacaaccaatttaaggaggaagaaaaatggcaaaggatcagagatttgaaaaggtttattcccagggaacgatgacaaccacggaaatctgggtcgataaggaaaccggcgtgaattatgtgtttcacgcaagcggatatgcgggaggaatgacgccgcttctggaccgcgacggaaagccggtcatttcgccggtgataaatggataaaaaagaactgccgcaataagcataccgtgttttgcgttgataagtaatattatcagaagatcacttcgtgagatttcagatggaaatgcagatggaaattcgttggagaaaaatgtgagcatttcttccagctgaatgtttgcatcagattccgtgtcttggccacgtttggacactcccggagtgtgtccgacaagccgcagacaatgagcggactttctggtgtccctaatggcacctcttcacagacaatataaaannnnnnnnnnnnnnnnnnnnnnnnnnnnnnnnnnnnnnnnnnnnnnnnnnnnnnnnnnnnnnnnnnnnnnnnnnnnnnnnnnnnnnnnnnnnnnnnnnnnnnnnnnnnnnnnnnnnnnnnnnnnnnnnnnnnnnnnnnnnnnnnnnnnnnnnnnnnnnatgttcagaggtgccaataagggacacgcacaaaagtcctaaaattgtctgctggcttgcggacacagtccgtggagtgttccaaacttggaaagacacggatcatcgaagatgcagacattcagtcggttagaaatgccacattttttgatccgaatgtccatctgtatttccatctgaaatcccatggtgtgatcttcttataatattacttatcgccccaaagaggtctatgcttattgtggcgattcctttttacgtcaatattatgccgcctgaccggcacggttctttccaaacagcttctttaagcagctgaaggcaaccagaacgccgagtaccattaaaagcacagcgacgataaactgcagtccgtcgacgaggaatgtcgcctgaccaccagcgatgtttttcaccagagcgattgtcttctggatcagcgcggtgaacgtcacggcgagcatggcaaacatcggtatgtagagcgtccagccggtgcgtccggttgtctttaagaagactgccagtgcgatcaggacaagtgcggcgagaagctggttcgcggaaccgaacagcggccatacattgttatatccgccgagtgtcagcagatagccgaaaaacagggtgatgaccgtggcaaaatatttgtttgtcagcacgcgctgcagcggagacatttttgccggatcggtcgtgtcgccgtagaacagttcctggaaggacatacgcccgatacgtgcgacggaatccagagatgtcagcgcaagcgcggagacgcacatggtcatgaagaccgtggcaacctgtaccggaagaccaaacttctcgaggaaaccggcaacgccggaggagaagatggcaaacggagttccgtccggcttggttccgtttaccgcgacagcaccgacaacgacaagggagacaatgcctaacagggactcaacaaccattgcgccgtagccgaccatcggcatatctttttcgttgctgatcgtcttggaggacgttcccgaggagaccaggctgtggaaaccggagacggcaccgcaggcgatcgtgacgaacagtgtcgggaaaaggctgctgccgtttacggtaaagccgttaaaagcatttaactgcatggcaggatgagcgacgagaacgccgaccaccgcgccgatgatcatgccgagcagcatgaacgttgtcatataatcacgcggctgcatgagaagccacatcggcatgacggatgccagaaacagatacgccatgacaatgtagatccaggcggatttggtggtgcagatcggaagtgccatacccactgcaaacatggcaacgagcagcgcgattgcaacaaccgcttttaccacttcattcatcttgccgacatgcttctggatcagaccgaagacaacggcgacgacgataaagagcatggagatggaagcagcggcggagtttgcgtaggaggtctcggcagtcatgccgtccacgccttttccgacgaacgtaccggcaaccatgtccgtgaacgctgcaatgacaagcagggtaaacagccagcagaacagcatgaagagcttccgtccggtcttgccgatatatttttcaataatcatacccatcgacttgccctcatttttgaccgaggcatacagcgcaccgaaatcctgtaccgcgccgaaaaacagaccaccgatgatcagccacaagagtaccgacacccagccgaatacggaggctaagatcggaccggtgacaggccccgctcctgcgatggaagaaaactgatgagaaaacacagtaaatctggaagacggcacgtaatcctccccgtcctcatgggtgtaagcaggagtcttggcgtttggatcaatgccccatttctttgccagccagcgcccgtaaaagaggtagccggcacccagtgctacgattccgattaagataatcactaaaccattcattttttttcccgcccgaaggcggctcctttctgatagatcaacattgggcaaagagaaggatggcattttctgtaaaacaaaaacgcccccgtcccgctgcacgaatgtgcagccaaagacgaaggcgtaagcttccgcgttaccactttgcttgtcgtaaaaaacgacctctcaatctcatctttgcgggcgtaagcctgcagcaataagcttccctgtaacgggggaatcccggtgacacctacttggttcagtgcactgctcgcagaggatagttcctgaaaccgcataccgtctcacaccgaccgacggctctctgtgatgcggggaatcaggaaaccgtgttctgttccttgcatttgctctttgtttgactatgacaatagcactgtgatgtggaaaagtcaagcgcaaatttttaatataagaatcggtaaagacggttgacaaataaaaaaacataatatatagtattcctatcagaacagtatgagaaaggagcgcggcttctatgaaacagatattatgctttggagattccaatacatacggattgataccgggaacgaaagaccgctatgactgggacacccgctggagcggacggatcggccagcgcctgtgggaggacggctgccgcatcgtcgaggaagggctgtgcggcagaacgacagtttttgacgacccgctccgggatggcaggcgaggaacggagcttttatctgtgatcttagagacacataagccggtcgatgtggttgtgctgatgctcgggacgaacgactgcaagacgatgtacgatacatcggcggaggtaatcgggagaggcgtggagcggctgctcgaccagatcagaagcagcaccccggacagtaagattcttttgatgtcgccgatcgcactcggcgagggcgttggcgaggcagggtacgatcccgaatttgatgagagctccgttgcggtgtcaaagcggctgccggaggtttaccggcggatcgcgcatgagcggggcatttcgtttctggcggcatccgcatatgcaaagccaagtgaggaagacagagagcacatgaatgaggaagggcatgccgcgctggcggaggcagtgtatgcaaagttaaaggaaatgctcgccggagagaaagagaacgcacagatcccggcctaggtggatcctgcgggacgatgatggctgctgaaccgcccgggagcagacggcataagataacagcagaagacgctgctgcgcggaggaagagacatggcagagaaaaatctggattttgacacggtcattgaccggacacataccaattcactcaaatatgattttgcggtacagcggggaaagccgaaggacgtgctgccgctttgggttgccgacatggatttccaggtttcttcctatatacaggaggcgctctctggcagcgtggcgcacggcattttcggctacagcgaggcggaaggcagctactttgaggcggttgcgggctggatgagtcggcattacggatggaacgtggaggaaacctggctggtcaagacgccggggattgtttttgcgctggcacaggcggtgcgggcgttcaccgagccgggtgacgcggtgctgctgcagcagccggtctactatccgttttcgcaggtaatccgcgataacggcaggaagattgtggataacacgctcgtacagggggaggacggaagataccggattgattttacggattttgaagaaaaaatacgcagtgcgcacgtgaagctctttttcctctgcaacccgcacaatccggttggacgcgtgtggacaagggaggagctcctgcggctgggcgacatctgtgaaaaatacggagtgattgtggtcagcgatgaaatccacgcggatttcgtctttgagggatcgcatcaggtactggcgggactcaaagaaagctaccggaaatttgtggtgacctgcacggcgccgagcaagacctttaaccttgcgggacttcaggtatccaatatttttatcccggatgatgcgctgcggcggaaatttgagcaggcggtcgcggcgtccggctatagccagcttaacaccatggggcttgtggcttgtgaggcggcgtaccggcatggcggggagtggtatgatgcggtgaaggcatatatccgtgaaaatcttgcctatgcgcagcattttctggaagaacagattccgcaggtaaaggcggtgaagccggagggaacgtatctgctgtgggtggatttccgcagcctggggctctcagggaaggagctggaggatctgattgtaaaaaaagccggactgtggctggattccggagacatcttcggcgcggcaggaagaggcttcgagcggatcaatgtggcatgtccgcgcagcgtgctgacggaggcgctggagcggctcgcgtgtgcagtgcgggaaaaagaaccgatcgtgtgcaaataggaaccacttatgaaaaatggggtgcaaaggcacctcatttttgttatgttaaatacagttcttgaggacacgaaaacatgccggcagaggaagacattttggagaggaggagcatgtgaaaatcaatattgaactggacaatgcactggaggagaccgaggtactgatccgggcagcgaaaatgaccgaggaagtcaacggaatcctaaaaaaactggaggagccgtcggtgcagatgatctccggttttgcgggagacacactggagatactggagcaggcggatattatccgcgtatacgcggcaaaaggaaaagtctacgcggtgacggcaaagggcgaatatctgcttcggatgcggctttacgaggcggaggaacggctggatcagacgcgtttcgtacggatctcaaattcggagatcattaatctgaaaatggcaaaacggtttgacctgagtttttcgggtacgatctgcgtgaacctcgcgggagggcagacggcttacgtctcgcgtagatatgtggcaaagatcaagcggctgcttggaatatgagaaagggaacggtgagagatatgaaaaagaaagtgttactgagaggattgttcggaattccaaccgggattgcgatcggctatgtgatcacggtcatgatgtcggcattctggggcgacggcagctactatccgtgtgtgcccgcgtttgtggacgcgatggggagtgagatacgggcagttgtggtgcagacggtgctgtgtggtctggttggcatggtgtatgcggcgggatcggtcgtgtgggaagtggatcgctggagtcttgccggtcagacggcggcgtattttctgattacactcggctcggtgcttccggtggcgtatgcggcatactggatggagcgcagcgtcgcgggcgtgcttagctacgtcgcaatcttttgtgcgatcttcgccggaatctggatttcccagtatcttggatggcgcgccaaaataaatcgtataaataagaaaatagcgcttgacaaataagaaatagcgtcctataatcaattcatacaaaacatagtagttttataggaaaacaaaaaacaccatagaaacggaaatgaattgagaacaggaggattttatgatgagtaaaattgctgagagcgcactggacctgattggaaacacacctttattaaagctgaaccgctactctgcggaagcaggcgtaaaggatgcaacaatcctgggaaagctggagtatttaaacccggcaggatcggtaaaggatcgtatcgcactggcgatgatcgaggatgcggagaagaagggcatcttaaaaccgggcgcaaccattattgagccgacctccggcaacacaggtatcggacttgcagcagttgctgcggcaaagggctaccatgccatcctgacattgccggatacgatgagcgtagagcgcagaaaccttctggcggcatacggcgcagaactggtactgacagagggcgcgaagggcatgaagggcgccatcgccaaagcagaggaattaaaggagtccacaccgggcgctgtgatcttaggacagttcgtgaacccggcaaacccggcggcacacaaggcaaccacaggaccggagatctgggagcagacagacggtaaggttgatatctttgtagcaggcgtaggtaccggcggaacggtaaccggtgtcggcgagtacttaaaggagaagaatccgaacgtgaagatcgttgcggtagagccggcgaccagcccggtattatccaagggtacaccgggtgcgcacaagattcagggtatcggcgcaggatttgttccggatgtactcaatacaaaggtgtacgatgaagtcatcacgatcgagaacgacgacgcatttacagagggaagagcgtttgcacgcagcgaaggtatcctcgtaggtatctcttccggcgcagcattaaaggcggcagccattctggctgcaagaccggagaacaagggcaagacgatcgtggctctgcttccggattccggagacagatatctgtccacctccctgtttgcaaagaactaggagaccgctcgaagagcaaatgccggatcctttggcagcacgggttttgcctgtgccgccggagggtctgtttttgactgtggaaagtgcggggggtctgtttttgaccgtggaaagtgcggaagacctgttattgcatgggaaaagtgcagggcgccccggaaaaacaggcgcagagacaggaaaactctggacatttgccgaaaacatgatatgatatcaaagtatcacaatgacaatctatcgtgacaggtgtcttgtcacctgaaaagcggatgtatagagaacggagataaaaatggaagcagagagagcgaagcggatcaaggaattgcagaaagagaaggatgttgtcattcttgcgcattattatgtggacggcgccgtgcaggagattgccgattatgtgggtgattccttttatctgagcaaggttgcgacgaaggtgccgcagaagacgattctgtttgccggagtgacgtttatgggtgagagcgcgaagatcttaaacccggataagacggttgtgatggcggacgagtgtgcggactgcccgatggcacatatgattacggcagaccggatcgcggaagtgagagaggaatacgaagatctggcagtggtctgctatgtgaactccacggcggagattaaggcggtatcggatgtgtgcgtgacttcctccaacgcggtaaaagtcgtgtccaacattccgcagaagaatattttcttcgtgccggacaacaacctcggcagatatgtggcggaaaagctgccggagaagcatttcattttccacgacggcttctgccatgtgcacaagagcattcacgcggcagagctgcaggcggcaaaggatgcctgtccggacgcactggtgctgacgcacccggagtgtaccgaggacgtggttgcgatgtccgatttcgtgggaagcacgtctgagattattgattttgcgacgcagagcgactgcaaaaagttcatcatctgcacggagatgggcgtattctttgaactgcagcagaagaatccggataagaagttctattcggtgggacacagacagttctgcccgaacatgaagaaagtgacgatcgataaagtcgagcaggtgcttgagaagctcggcagcggagaacttgaggagatcacgctctccgacgagatcctgacccgtgccgcaaagccgctgcagcgcatgttggaacttgcaaaataacggcggacgctatatgatagaagcggacaggcgtaaacgttacaatatacaggagtatctatgttaaatcaattttccagaacagaattattattaggaaaagaggctatggagcggctctcgcgtgcgagggtcgctgtttttggcattggcggtgtgggaggctacaccgtagaggcgctggtgcgcagcggtgtgggagctatcgatctgatcgacgatgacaaggtctgcctcaccaatctgaaccgtcagatcattgcaacgcgcagcaccgtagggaaatataaggtggaggtcatgcgggaccgcatcctcgacattaacccggactgtaaggtggaggtgcacaagtgcttctatctgccggagacgagagacgagttcgatttttcgagctattcgtacgtcgtggacgcagtcgataccgtgacggcaaagattgcgctggtcatgcaggtgcaggagacaggaacgccgatcatcagcagcatgggcgccggcaataagctgaatccggcaatgtttgaggtggcggacatctataagacatcggtctgcccgctggcgaaggttatgcgccgcgagctcaaaaagcgcggggtgaagaaactgaaggtggtatattccagggagcagccggtcacgccgatcgaggatatgtcgatcagctgccgtgcacactgcatctgcccgccgggagcaaagcataaatgtacggagcgccgtgcgattccgggttccaacgcatttgtgccatcggtggcaggattgatcattgcatcggaggtcatcaaggaccttgcggcagaatagagaatgagggacaggcatgtatcagagaaccatagaagaactgcagaaggacgagcgggaaaaagtaatcatagacatccgcagagaagctgattttttgagagagacatatccgggagcaaagcatatctactgggaggagtttgaggcgcataaggacgaggtgcccaaggactgcccggtctacctgatctgctatacgggagagcgcagcgacgagctggcgcgcgagcttttagaggagggttatgaggtatacagtgtgcagggcggataccgtgcgtacctgcgcatgaagctgttagaatccatggaacagacaaaagcgccggatgccgaagagaagaacctggaccgctgcagcgagatcgagcgcagcattgtcaaaaagttccgcaaagagatctggcggaagttcacaaaggcgatcaacgaatacgagctgatccaggacggtgacaagatcgccgtctgtatttccggaggaaaagattccatgttgatggcgaagctgtttcaggagctggagcgccacggcaagaagaatttcgaggtggtattcctcgtcatgaatccggggtacaatgagatcaactacgagacgatcgtaaacaacgccagaatcttaaacgtcccgatcacggtatttacttccgagatctttgacattgtggcgggtgaggaggaatctccgtgctacctgtgcgcgcgcatgcgcagagggcatctctacagcaaggcaaaggagctcggctgcaacaagattgcgctggggcatcattttgatgatgtgatcgagaccatccttatgggaatgctttacggggcgcaggtacagacgatgatgccgaagctgcacagtacgaacttcccggggatggagctgatccgtccgctgtatctggtgcgcgaggaggacatcatccactggatgaattacaatgacctgcactttattcagtgtgcctgccgtttcacggaaagctgtgcttcctgcggcggtacggagaagggttccaagcgcgcggagatcaaggatctgatccgggagcttcgcaagaagaatccttacattgagaagaatatcttccgcagtgtggagaacgtcaacctgaacactgtgatcggttataaaaaagatggtgtccgccatcattttctggatgaatatgacaaagcataatctttgattttgtgtcatttttatccccccgaggggcttgtgcggcccctctttttcatgctatcctttgtgcactgggcagaaatgccggcaattttaacaagggagaataaataatgaaaaagaggtggatggcgctgcttggggcagcggtagtgacgatgaatctgtttgccggatgcggcagcacaggtgcggagcagacaggcaataacgcagatggtacggcgacagaggcagtacagggaaaagacagcgccggagacgggaatgcggcgcagagcgtggcaggaaccgcggatacggtcatcgtggcgatgagtccttcgtcggagccggcggcgggatttaacccgtgcatcaactggggctgcggggaacactgccatgagccgctgatccagtcgacgctgatccggacgaacgtggatatggagttcgagaacgatctggcgacggattacagtgtgagtgaggacggactgacctggacgtttcacatccgggacgatgtgaagttcacggacggggaaccgctgacggcgtctgatgcggcatttacgtttaacacggcgcttgccacgccgaattcggaggcggacttaagtatgctcgattctgtggaggcaccggatgataccacggtgattttccacatgagcaagccgtacaatgcgtttttgtatacactggcggtgttcggtatcgtgccggagcactgctacgatgaagcagcctacggggagaacccggtcggttccggcagatatatcctgacacagtgggacaaagggcagcaggtcgttttggaggcgaatccggactactacggggatgaagtgcagatgaaaaaagtcattgtcctgttcatggaggaagacgcggcgcttgcggcggtaaaagcgggacaggtggatatcgcctacacgtctgcggtgtacagcgacgagcaggtggacggctatcagcttctggtctgtaagtcggtggattccaggggaatctcgcttccgtcgattccggcgggcagcgaggttgtcgacggggataccgtgtatgcggcgggaaacgatgtgacatgcgatgtggcactccgccgggcgatgaactacgcgcttgaccgtcagaccatgatcgatcatgtgttaaacggctacggcgaggtcgcttacagcgtatcggataacatgccgtggtcgagcgagtccatgattatcccgtatgatgtggaaaaggcagagcagattcttgcggacggtggatggagtgatacggacggcgacggcattgtggaaaaagacggacagaaagcggaatttaccgtgtattattccgcgtccgattccgtgcggcaggcgctcacggcagagctctccaaccagatgaaagcggtaggaataaacgtattatacgaaggtctgggaagctgggacgagttgtatacaaagatgtactccgacccaattacctggggctggggttccaactcgccggtggaggattatcagctgtattataccggcggttcctgcaattttacgggatattccaatgagaagacggacgaacttctggatgcggcacttgctgcgacagatatgaatgagtcctacagtctctggcagcaggcacaggaagatgtcggaccggatgccgaggcactctgggtatggtttgccaacgtggatcatctctactttgcgcgggatggcctggcagtggcggagcagaagctgcatccgcacggtcacggctggtcgttagtcaacaatgtcgaccagtggacctgggaatagatgagggaagaatgaatatcaggcattacataagctttttcataaaaaatgtaataaaaatgctgacactgctgatcggtgtcagcattgccgcgtttatgctggtgtcgctgtctccgattgatccggtacaggcgaacgtcggagcgacggcttacatgcgcatgacgccggagaaacgggcgcagatggagtcctactggggaaaggatgtgccgccggcggagcgctatctgaactgggcgaaggattttgtgcggggggatatgggcacttcgctgaaatataaccgcccggtcgcggaggtcgttgcggagaagttcggcaactcgtttgcgctgatgtgcgtggcgtgggtactgtccggaattctggggcttgtgctcggcattgtggcggggtattttaaagaccgtctgccggaccatctgatccgcgggtatgcgctgcttctggctagcacgccggcattctggatcggtctgctgctcttgatgatctttgccgtgtggctcggctggctgccgttcggcatgaatctgccggcaggcatgacggcggcggaggcgggcatcggcgtgcgcatccggcatctgattctcccggcgctgacgctcgggctgacgggcgtggcaaacatcacgctgcacacccgggaaaaaatgattgcgatcatggagagcgactatgtgctgtttgcgcgcgcgcgcggggagagcagcggctatatcgtaaaaagacatgccctgcgcaatctggtgctgcctgccatcaccctgcagtttggttccatcagtgagatctttggcggctcggtgctcgtggagcaggtattttcttatccgggactcggacaggcagcgattgatgccgggctggggagcgatgtgtcgctgcttttggcgatcacggtcatcagcacactgttcgtattcctcggaaatcttgcggcaaatgtactttacggtgtgattgatccgcagataaggaggggcagaagtcatggataaaaccggtcatatgacgattgctgcccacacggcgggcagacgcaacgggcgccagtggatgcggcgctttcttctggcggcagtgctgcttttagcagccgttgcagtggctggaatctgtctggaggagcgggcggtggtcacggatttttcgcgcaaaaatctgccgccgtgccttaagtatctgtttgggacggactggatggggcgtgatatgctgtcgcgcacgctggcggggctctccacgagcatccgcatcggtgtgctggcgtcggcggtcagcgcagtgcttgcgcttttccttggaactgccgcggcggtcggcggaaaatgggcggacggcatcatcagctggtgcattgatctgatgatgggagttccgcatattgtgctgttgctattgatttcctacgcgcttggaaagggtgaaaagggtgtggttgtcggtgtggcgctgacacactggccgaacctcgcgcgcgtgatccgcggggagatcctgcaggtgcgggaggcggcgtacgttggcattgcaaaacagctcgggaaaagtccgtggtacattgccagatggcacatttttccgcagattcttccgcagttccttgtgggactggtgttattgttcccgcacgcgatcctgcatgaggcgagcatcacgtttctgggctttggactgccgccggagaagccggcgattggcgtgatcctctcggagagcatgtcgtatctgagcaccggaaaatggtggttggcgctcttcccgggactggcgctggtcggcgtggtggttcttttcgaccggatcgggagcggcttaaaggcgctgcttgacccgtcgagcgcgcagctgtagaagattttgagtggagaaaaacgatggaagagaaaaaagaattactgcgcatcgagcatctgacggtatctttcgcgcagtatgagaagcgcagtgcaaagcaaggggaacttccggtgatccgtgatctgaatgtgacggtgcgtgagggtgagatcgtcgcggtcgtcgggagcagcggatcgggaaaaagccttctggcgcatgccataatgggaattctccccgccaatgcggctgcaagcggcagtattttttaccggggaagcgcctgcggcgaggcggaattaaaggcgctgcgcggcagggagatcgcgctggtgccgcagagtgtcaattatcttgatcctctgatgaaggtcggcagacagatcattggggaaacgaagaagcggcagaagctttttggcgaagcagaccagggaaagcggcagaagcttttttgcggagcagaccgggaaaagcggcaggaggaagcgcggatgcgggaactccttgcaaggtatgggcttgcggacgaagttgcggatctctatccgtttgaactatccggcggcatggcgcgccgtgtgcttttactgacggcactgatgtggcagccgcgcctgatcattgcagacgagccgacgccgggcatggatcttgtgctggcaaaacaggcgatgcaggatttccggacatttgcggacgatggaaacggcgtgcttctgattacacatgatctggaactggcgcttgaagtggcggaccggatcgttgtgttttatgccgggacgaccgtggaggaagcgaaggtgacagattttgcggacgagacgctgttgcggcacccatatacgagagcgctgtatgaggcgctgccggggcgcgggtttgcggcactgcccggaacacagccttacgtgaaagatctgccggcaggatgtccgtttgcaccgcgctgcgccgaccgtcgggaggcgtgtgacggggagattccggtcgcttgtgtacgcggcggcagggtacgctgcatattgtatacagagaattcataaagaactatcagagggagaggaggaaacgtccggtgagactgaaagcggaacatatcagctataaatatccggggggcagcagagaggtgctgtcggatgtgagtctggaactggggagtaccgaccggctggggatcgccgcgccgagcggctttggtaagacgacgctctgtcagattctggcgggctgccgcacgccgatgactggacgtgtctgtgtggatgatatgccgcttccggggagcggttactgcccggtgcagatgatctggcagcatccggagcaggcggtcaatccgcgcgtgcggatgcaggcggttctgcaggagggagattcgatcagcgaacgtgtgatagaggggctcgggattgagcgggactggtgtaaccggtatccgggcgaactatccggaggagaactgcagcgattctgcatagcgagggctctgggggagagaacacggttcctgattgcagatgagatcagcaccatgctggatcccatcacccagagccagatctggaacttccttctggcggaagtgaaagaacgaaaaatagggcttctggtcgtaagccatgacgaaaagctgatggagcaggtctgtgaccgcatcatgcggctgtgatgcctgcaaataaaaagaaaaatcagaatatcatcttcgcgcggttcttcaataagcgcgcgccattcacaatgagaagaattccggctgcaatgccgcctgtcagtacgcagatgccgacggcaaggcttgcagcgccggtcgatcccatcgtcttgtaaatcttttcttccataaaagcaacctccttaatacaaaacaatccatttatggttagtattttaccatcatttggcggaatatacaagaaaacggtcacggcagccagccatcgtcctccgacagcacaagctctctggaaaaatgggcagcctgtgcaccgtctaaggtatccacaaagtctgcacgctgcgcaaacgggcggcagccgcctgcacagtcacagtcagcgtcctgtggataactgtgatactcggcaaaaagaacggtgccgtgagcgcgctccttgccccagtcatgaaatccggcaggatgaatgtgggcgcctatcgcgcagtccatgaggacaacccgtgcgtaatcccgccagggacggccgatataggccgcgtgctgtggacaaccctccgcggcaaagcggcagttgtggaaaacatagccgtattcctgcccttcgggggtggaagcggcggtggcatatccgggacctaaggatgcgatcgtacagccttcaaagtaagcggttgcactgccgaaaataaagtcgatatcgccgcagatatagcagttgtggtaatattgtctgccgttgatgcgcggcgcggactcggttggtccgcggaagccgccgggctcgtattcctccgagggaagcggaccggtaaaaagcgtatcctgatgcccgagaatccggcaggattccgcgacaaaacggtcacattcgacgtagagtgcgattgcctgcccgtgcgttttggagtcgccggcagtattctcgatggttaagttgcgcagcgtgacgtctgcggcatgcacgaaaaaggtgtaggagcggaaggttccgcgcttgatgccgtccggcatgatctcgtagccgtaatcgccgaaggagatcacggtgtcggacggggatgctcctgcgccctcgatcgtgacgttcgggcgtgtgagggataatttttcgcggtagattccgggcatgacgcggatggttacgggcaccgccgggtcttctggcatggcggcgaacgccgctttcagtgaataaaagctgccagaggcatctgcccctggcgcaacggtcattgtatacataagtggcttccttcttggaaaaatagaattaacgggcgagaatatcgatgatctctgcgacatacatggtgtgcatatcgccgtccttgtaccatttttccttgatctccgggagaagaaaagagtcttccgtaatgcgggtggcagacattttctcgcagagaaggacaaagttgccctcgtccacgtaagggatgttgtggcgcgtggcgaggttaagacctgccgcggcgaatttgtcttcgtctcttccggaatgggaaccgcagtaatttaacgcgtcacggtattgctcggacaggaaggtaatggagaagaattcgttcgcgtcgatgaattccttggtgtagcgggaatcacgcacaaaaatgaaagcaacattttggccccagaggacaccgacaccgccccagcttacggtcatcgtgttggctttttccttgttgccggctgtgacgagcgcccactctttgccgattttggtaaatggattaaattctacaagatcgaatggtaatggttggaatgtgtgcataaaattacttcctttctgtcaggatcatttctataaaatatgataccattttggcgggaaaatgacaagaaagccgacggcaaaacgggatacttttcacgccggaaggaaggggcgcagatgagcgccggagcagttgaaaaaatagccggagcgcgtataatagtaatatagtacgcaaaaggaaaaggaggagcggcgatggcaggattaggccacagacaggatcggggagtcatgctcccgccactggatgagattgacggttttatggtgcgcccgggattttacaattcggaaggtgcagtgccgacggcgaggggagtgagctttacgattcattcggtcggtgcgacgggatgtacgcttctgctgttccggccgcaggaaaaagagccatatgccagactgaagtatccggaggcatatcacattggcaacacgttcgcaatgctggtattcggcttgaagattgatgaatttgaatatgcgtttcagctggacggaccgtatgatgtgtccagggggctgttgtttgataagaacaatgtgctgctggatccgtttgcgaaggcggtgacagggcagcggaactggggcgagcgtccggagagtgacgagggttttgtgtatcacgcccgtgtggtggagaataattttgactggggaaaaatgacgtttccggagattccggcggaggatctgatcatatatgagacacatgtaagaggatttaccagggacgtttcttccggggtgacggcaggcggcacgttcgagggactgcgccagaagattccgtacctgaaggatctgggcgtcaacgcgatcgagcttctcccgatttttgagttcgatgagatggagagcgcccgcgtggtggacggcgtgcagttgtacaattactgggggtacaatacggtgagcttttttgcgccgaacaccagctattcgtccgtggtcgagcacaatcacgagggagacgagttaaagctgctgatcagtgaactcaaggcaaacggcatggaagtcattctggatgtcgtgtttaaccatactgccgagggaaatgagaatggaccgtgtttttcgtttaagggcattgataataatatttattatatgctgacgccggatggacattactacaatttcagcggatgtggcaatgccatgaactgcaaccacccgatcatgcgcaagtttatcattgactgcctgcgctactgggtgatggagtaccgcgtggacggtttccggttcgatctggcttcgattctgacgcgtgaccagaacggggcgccgatgccggacccgccgatcttacaggggatcgcctgcgacccgatcttaggacatgtgaagctgatcgccgaggcgtgggatgcggcaggactttaccaggtgggaagctttccggcatttcgcagatggtcagagtggaacggcagatacagagatgatatgcgccgctttttaaagggcgacgggagcatggcgggaaccgcgatcaaccgcatcatcggttcgacggatctgtacgatccggtgcacagaggtgagagcgcatcggtgaatttcctgacctgtcatgacggttttacgctctatgatctgtactcgtacaatacgaagcacaatgagaaaaacggctggaacaatacggacggcgacaacaacggaaacagctggaactgcggtgccgagggagagacggacgatccgcagatcgagggactgcgccggcgcatggtgaaaaatgcgtttgcgacgctgctctgcagccgcggaccggcgatgttctacggcggcgacgagttctgcaacacgcagttcggcaacaacaatgcctactgtcaggacaatatcatatcctggctggactggacgaggctggaaaaataccgggagattcatgattttgtgcggtatatgatcggtttccggaagcgctatgccattctgcgcaagaagacgaagccggtggcatgcaatctgccggagatcagcattcacaacggttatccgtggaacggcggtacggattccaacagccggctcatcggcatcatgtatgcgggaagagatgagcacgacacgcgggacgatattgtgttctattgtatgaatgcttactgggagacgttagtgatgcagcttccggaactgccgaacgggctccagtggaaagtgtgtgtcaacacgtccgtggagtacgaggatggcagggatatggagtcctacacagagttttattataagaagacattgaaggttccgccgcgcacggcgatcgtactggtggcagagtaagcgggtgaagcgggcagaaacccgtggcgaatgcctgcagcctgcgttgcggctcctagaggtagccgccgtcgagggtgatgatctgtccggtcaggtagtcgtttccggtggttatctgcacggcaagcgatgccacttcctccggcgcgccgaagcgcccggcggggatttcctcggcgagctgggcgcgttcttcctcggaaaagcaggcattcatctcggtgtcgatcacgccgcaggcgatcgcgttgacctggatgttgctcggagcgagctccttggcgagggcgcgggtgaaggaattgatgccgcctttgcaggcggagtatgcgacctcgcaggaggcgccgacatttccccagatcgaggagatgtttaagattttcccggatttctggtggatcatgtgtggcagggcaagcttgctcgcggaaaagacggaggtcagattgacgccgatgatgcggttccactcatcgatggtcatatcttccagcaggccgatatgcgagatgccggcattgtttacaagaatgtctatgccgccgaagcgggcttcgctttgggagaaaagctgttccatataggtatagtccgatacgtcgccgatgctggtgagtacgtccacatggcaggtttcccttaattcgtctgccagcgccagcagctccttttcggagtgggaacagttgatgaccagacggcagccctccctggcaaaggcgcaggcgatcgcccgcccgatgccgcgtgaggcgccggtaatgagtacggttttatacatgatgaaagacctttcttctatattgtgaatgtgttagtatgcagtgttcacgcacagtatatcacaaaatttaggcggctttgtttgaaatttcaaaaaaattaaaaaaatacaaaatttttctggacaaacagaaaaacttgtgataatataattaagcacgatttgagagacaacaaagtgcttcacaaatatcgatgcgtggctcagcttggtagagcgctgcgttcgggacgcagaggtcgcaggttcgaatcctgtcgcatcgactgactggtaagaagccgtcaaccttagagagatcaagggttggcggttttttgtgtatagaatatcagaagaaaaggatcatgaatgttaagagagaagatagtacactttcttgcctgataataggttcactgcttgtcagataggatggattttgttaaaataattacaaaagcaatacaaacaatgacgagaggaggaacctgaatgaactctccgcagacaatcaatgggttaatgcggcatttgagaaatgattgcaaaatacaaattagcggaagttatcaaaaacagcaattaacaagctatggctattatcatgggtataagggataccgttttgccggaaatagttacaggcagattccatattctgatttcagcgaggtggtagcggttattgagtatgataataatttgaaggcagcgctgtatccggaacttatgtttattgagacagcacttaaaaatattgtgtgcaatgaatcagtgaaaggtcttaagcttggcacttttgagcatctttataaagaacgtatgagtgataatacgacaaatacgaaattgcagtcaaaacgccttaaattgcgtaattcggtgtacgccaaattagctgcgcgctatcatgatgaagaagaaaaagaaaatcaaatggtgcggcacttttataatagaggagaagatgcacctatctgggtcgtttttgaaatactatatcttagtgatctggcaggtttttttgagtgcctaaatgaggcggtacgtgagaatatcttaaagcagatgaatatgtttgatatttcgatagatgctaataaaaatttactttctatcatgatttacactttgaaagcactgcggaattctgttgcacataataatattattttcgatactagatttaaagatcggaaaatcagccccgtgcttaaaaaatgggtagaaaaagaaacgggtattcagaatattacgttgtattctctgattgattatattataattgtgtgctgtcttcttaaacgagtggattttagtggtacgagagcattgactttgctaaataagtacaaggaagagaatcagcgactgcagaatagtgttgcttcggagatttacgatcatattatacagaataatgttccggcaaaggttgtggggttagaggcgtatttgaatgtttgaaaaaataataaaaacttgcatttttcaaggatataagatatattatatgtaatgaaagaggtgtatgttttcggactgcactggaggagtcactctgtggctcctttttatgtatgggctttagtctgtatgggcatttaatgccgggtgatatccataggaaggaactcaaaaaggaactcaaattatttgagttcctttttgagttcgtgaaataaaatttgagtttcttacacaaaaaatagtgatacgatataaaaatatggggagaactaaaatgacaacgaaagaattacttgaaaaattagagttaattcagaaacttaaatgtgaaactccaacagataaagagtgcaaaccagggatgtcccagacatttatatgattcgctgtccagtttttccaatcaggacgatggggaatcccgacaatacgcagaacgatgcaggaatatcacttgccacaaccggaatttttggatgaaagaaggagttttattgcgatgaaaggaaaaaggatcaaggataaagattctgtcaacagaacgcgaattgccttgtcaaagcccccggtgcagtgtataattgcactgatgatttgcgagtgaagaacacgggaggaagacatgggaaaagacgttattattgcatgtgattttaacagtaaggcagaagtcattgcgtttcttgagaagttcaaggacgagaagccgttcgtcaagatcggaatggagcttttttatgcggaaggaccggacatcgtgcgtaccatcaaaggaatgggacacaagatcttccttgatctgaagcttcatgacattccgaacacggtgaaaaaggcgatggcggttctctcggggctggatgtcgatatgtgcaatgtacatgcagcgggaacgaagggcatgatgcaggcggcactggagggactgacgagagcggacggcagcagaccgctgctgatcgcggtgacgcagcttacctccacgagcgaggaagtgatgcagcaggagctgtggattgacaagccgatcgatgagacggtcatgcactatgcgaaaaataccatggaagcaggactggacggagtcgtatgctcgccgcttgaggcgggtaaggtacatgcagtctgcggagaaaagtttttgacgatcacaccgggcgtgcgttttgcggacggcgatgtgggagatcagaagcgtgtgacgacacctgcaaaggcaaaggaactcggatcggattacatcgtagtcggaagaccgatcacacaggcggcggatccggtagcggcataccgcagatgtgtggaagaatttgtaggttaggacggcatacacgaagaggagatggacgaaacagcctggtctcctctttttttcataggaagaaaaggacggtggggaagatgcctcaaaaaggattgagcggaagcacattgaagttgatcgcgatcatcacgatgctgatcgaccatatcggagcggcggtcattgccagactgctgattgccggacaggggagtgagatgctctataagatctattatgcgatgcgcgccgtcggcagagtggcattccctattttctgttttctgcttgtggagggatttttttacacgggcagccggaaaaaatatgcacttcggctgtttggatttgccctgctgtcggagataccgttcgatctggcattttccgggaaaatactggaattcggctatcagaatgtatttttcacgctgctgatcgggcttcttacgatcatgctgtttgatgcggtggtgaaaaagcaggagtggcatccggttttgcgcagtgcgctgcttgtcatcatcacattcgggggaatgggtgcggcctatctgctacacacagattatgatgcaaaaggcgtgctcgcaattctggtgttttatatgacgagacagatgcggggattacagatcgtggcaggctgcctggcgttctgctgggaacttccggcgatcgtggcgtttatcccgattgcgttctataatgggaagcgcggatggaacataaagtacctgttctatgcgttctacccggtgcatctattggttctttatctgatctgtgtagggatgggaaccgcgcagattgcggtggtgtaggagagaaagagaggaagagagtaagtatggagatatcaaaggagacgcggaaacggatgatgcagatcattgcatttgggattctgctctattgcgggatggagcattttgacgtggtgatcggagcggtggattttgtgctggggattgtgatgccgtttctggttggaggcgcgatcgcattcgtgatcaatgttccgatgaagagtatcgagcggcatctgtttgcgaagaacgggaagcttgcaaaatggagaagacccgttgcctatctgctgacgcttgcgcttgtgatcggtattatcacgctggcacttgtggtcgtgataccggagcttggaaatacgatttccatgattgtacagcaggttccggttgcggtaaaagccgtacagaagtggctgacagatcttccggacagctatccggcacttgcccctgcggtggcggagcttaatattgactggtcatcgcttgccgactcgattgtgacgtttgtgcagaattttgcggcgggggttgtgagctccggcgttggtattttttccgggatcgtgagcggtgtggtgacgtttgtgattgcgtttacgttttccatctatgtgctgttccagaaggagcgtctggcgagacaggcaaaacagattctgtacgcagtctttccggagaaggccacggagaagattctctcggtggcagctctgtccaatcaggtgttttccagtttcctgtccgggcagtgcgtggaggcggtgattctcggcaccttgtttgtcattaccatgtcgattctggggatgccgtatgcaatgctgaccggaatcgtgattgcgataacggcgctgattccgattttcggcgcatttatcggctgtgtcatcggaatgcttctgatcgtgatggtagatccggtgcaggcggtgtggtttctggtgctgtttttggtgttgcagcagattgagggaaacctgatctacccgcacgtggtgggaagttccgtcggactgccctccatctgggtgctggtggcagtgaccgtcggcggcaacatgttcggcatcctgggtattctggtgttcattccgctttgctccgtgctgtacgcactgtttgccatgtttgtgaaaaaaagactgcgggagcgggagattcccgagagccgctggaacgcgccgtcaggcggcgctgcggcgaccgagcccgcagaagagcagtcttgtggataaatgacaaaaagcctttcggaagtgtaggagggacttccgaaaggctttttgaaatagtgtaatatggtatatggaatatatataaaacccgccggcagtgccggtgagagagtttttaggcggaactgacagaaccccaacccccgcgtcgaaactcaacagctccttttgatgattctatcttatcgggaaaatgtgtcggaagcttgacggcaaaatgaagaatgtcttaatatagtgtaagaaatttctaaaaagtggaaaatatttataaaatggcgttggaaaaaggggaagcattacttggaagcatacgaatatctggaaaaaataagagcggcggcgccgcgggtacactgtatcacgaactatgtgacggcgcatgacgtggcaaacatgatcctggcgtgtggagcgaacccggtcatggcggacgagccgcaggagatgggagagatcacggcgcatgcgggggcgctcgcccttaatatgggaactcctagcgagcgcagagagcaggcaatgcttgcggcgggaaaggcggcaaacgcgaacgggattccggtactgcttgacccggtcggcgtcggtgcgagcgcatttcgccggaagatggcagaagagctgttggaggcggtgacgtttaccgccatacgcggcaacatgtcggagatccggacgctttctgaactggcagaaaaaaaggtgaccggctcatccggcggcgtggatgtatgtccggtggatgtggtcacggaggagacgcttgtggaagcggtcacctttgtaaaggcggtctctaagcgccttggtgcggtgcttgcggtgaccggtgcgatcgatcttgtctcggacggacagcagtgtgtggtgatccgcggaggaagagaggagatgagccgggtgaccggaaccgggtgccagctctccggacttgctgcggcgttcctcgcggtggcgcgggatatggaagcgccggctggaagcaccggcgggaatactgcgggaggagcggcatgcgcgacgcgcggcatggaggcggtcgcggcggcagtctgcgtgatgaatgcagcaggagagattgcatgggagcagcgcggtttatgcggcggaaatgcctcctacgggaccggtatcattgatgctgtgtaccggatggaccagaaaatgctggagggaaggattcgttatgaagtgcggtaaaagagatttgctgctttatgcagtgactgatcgaagctggagcgaaggaacaacgctgggggcgcaggtggaagaagcgctccggggaggcgcgacatttgtccagctacgggaaaaaaagctgaccggggaagcactccgtgcggaggcgttggagatccaggcagtgtgccggcggtacggcgtgccgtttgtgattaacgacgatgtggcgcttgcgaaagagattgacgcggacggggtgcatgtcgggcaggatgatatggaagccggcgatgtgcgtgccattctgggcgctgacaaaatcatcggcgtatctgcgcataatgtggaagaagcgctccgcgcagaacgtcatggcgcggattatctgggcgtcggcgctgcgtttacgaccagttccaaaccggaggcgggacacattgacgcggagacgatacgtgccatctgcgagacggtaaagattccggtcattgcgatcggcggcatcaaggaggggaatcttctgcagctgcgcggaaacggtctgtgcggcgttgccgtgatcagcgccattttttcacagaaggatatcgaggcggcgacgaggcgtctgcacgctctggcagaggaaatggcgggggatcaggaatgaagggtgcaatttttgatatggacggcacgctgctagactccatgcaggtgtgggttcacgtcggcgagcagtatttgcggaaccggggaatcgaaccggaagaagggctcggagatgtgctttttcccatgagcatgcgggacggagctgtgtatgtgaaggaaaagtacagtttgccggatccccccgatacgattgtgacggacatggacgcgattgtgtttgcggcataccgggatgaggttctgccgaagccgggcgttgcggcatatctagaatcgctcaaaaagcagggaataccgatggcggtcgccaccgcgacgaaccggccgatggtggaggcggcgctcgcgcggacaggacttgccagctattttaaacagatttttacctgcacggagatcggcgcgggaaaagaaaggccggacatctatctggcagcggcaaaggcacttggtacgcacccggcggacacctgggtgttcgaggatgcgctctatgcgattaagacggcaaaggcagccgggttttatacggtggggttttacgatgagacgagcagaaatgatcaggaggcgattgccggcctggcggactgctatgtgcgggagattcaatctgttcccacacaagactgtacttgagaatgtaatgctggcgcctgttcatgtaaaaaagatggagaaaggaagggcagaggctcttgcaaaagaacggatcggaaaagccggacttgcggacaaggttgtctttatggcggatggaagaattcttgaggaaggaaagccggaggagattttttccaatccgaagacgccagaggcaagacagttcctgcggagcgttctgtagtagagtgatgaataaatttgtgatgagacaatctttgctgctgcttttgacggcaacgatctggggcgttgcgtttgtggcgcagagtgttggaatggattatatcggaccgtttacctttaacgtagtgcggaatgtgattggcgggttagtgctgatcccatgtattgcagtgtttcatagaacaggtgcaaaggaagaggatgccggaaagacaccgggaagccggaaaaatctgctgcttggcggaatctgctgcggggtcatgctttttgtggcaggcaatctgcaacagatcggaatacagtatacaacagtaggcaaggcgggatttatcacagcgatgtacattgtgctggtgccgatattaagtatttttttaggaaaaaaggcgggaatcaaaatctgggccgctgtggcgctggctgtcgcagggttatacattttatgtatgacagatggcagcttttccctgcagaagggagatctgttcgttctgctgtcggcatttgcattttcggcgcacattcttgttattgatcattttgcgccgctggcggacggtgtaaaaatgtcgtgtatccagttttttgtgtgtgcactgctgtcggcggtctgcatgtggctgtttgagaaaccggatatgggagcggttctgcaggcatggattccggtgctgtacgcaggtgttttttcctgtggcgtggcgtacacactccagattgtcggacagcgtggcatgaacccaacggtggcgtccttaatcctcagcctggagtcggtaatttcattgattgcaggctgggtaatattagggcaggcgctctcggtacgtgagctttccggctgtgtgctgatgtttgctgcaatcattctggcgcagcttccggagcggaaacgtggcgcgtgatttcctgtgattttgcaaatttagcgtagaagtgccagaaaaactgtgatatgataaaaaagggaaaacgccttcggattccgaaggcgttttctgttacagagacattttaggacacgaaagctggtaagagaatgatacgcagagcggtactgcaggatattcctgcattgatggatatatataatgaagcgattcttcacacgacggcaacgtttgatacggaagtcaaagacatggagaaccggaaggcatggtttgcggagcataacgggcgctatgtcatttatgttgatgtggaggacggcaaggtggcgggatatgcgtcgctttcccgttacagggaccgtaaggcatttgacccggcggtggagatatcgatttatgtacacaaggattatcgagggcgtggcatcggccgcagcctgatggagaaagtgcttgcctatgcggcggagtgtgaggagattgacacggtcatctctttaatcaccagtgagaatgcggcgagcattcatctgcatgaggcgtatggatttgagtattgcggtcagattaaaaatgcagggacaaagtttggaagaaaactcagtctgaatgcatatcagattctatatgacaggtagagaggatatagggcaaaagctatgatgaaatattttatgaccgataatcaggtgatacatgaggaggagaagctgcaggacggcgtgtgggtgcggatgatcagtcccacgcaggaggaatgtgaggagattgccgatgtgctgaatgtggatatcgacgatatcaaggcagcactcgatgaggaggaaagctcccgtatcgagctgcaggacggatatacgctgattctggtggacgttccgacgacagagatccggcacgataagcagtcctacacgacaatccctctcggcattatcttaacgcaggatgtgatcgtgacggtgtgcacggaggatacgccggtgctcaagaattttgtgatcaaccgcgtgaaggagttcagcacgaaaaagcgcctgcgctttgtgtaccagattctgtaccgcaccgcgacgatctaccagaccaatctgcgcatcattgataagcgccgtacggagattgaggagcggatcggacaacacaccgaggacgtggatctgattgatctgcacgaactggagtccacgctggtctattttgccacatccctgcgtgcaaacggcgtggtgttagaccggctgacgcgctataagagactggagcagtacccggaggatacggagcttctgggggatgttatagtcgagaaccagcaggcgatcgagatgacttccatctaccgtgacatcatcaacggtaccagagaactgatgtcctccgtgatcgacaaccgcctgaataacgtcatgaagtatctgacctcaatcacgattgttatggcgattccgacggtcatttccggtatctatggaatgaacgtggatgagcggtggatgccgttcgctaatacgccgcacggatttttgctgatctgtgtgctgactctgttgatctgcattatcacgatgctgatactgcgtaagaaaaagatgctatagaacaagcggcgggagaatctgccgcacgatcgaatcatgggtggcgcagcagagcagctgcgcggagagaagagtataatgaagacaaaaatttacggaaccatcggaccagcatgctgtgatacagagatgctggttcatttgtttgaaaaaggaatgacaggaatcagaatcaatctgtcccatgcggatctggaagaagcggatgcgtggatctccggcatccacagcgcatggagccggctgcatgacggaacgccagagattctgattgacttgcggggaccggagctccgcatcggtacgcttggggcagagcgtcttttaaaagagggagacggtctgagccttgtggcggacggacaaaacaatctgtttgatccgacggagattccggtgccgggaacgctgcttgtggcgcttgcgcccggacaggagattttgctggacgacggcaggattgcattaaaagtagaagaacaattccgctgcggatcgtctgtcgcggtggaatgtaccgttgtgcggggcggcgtcttaaaaagcgggaaaagtatcgcggcgcccggtgtggagatacagacaccgacgctgacggagcgtgattacaggaatcttgccagagtaaagcagtgcaggatcacaggggtcatgcttccattcgtgagaaatcaagaagacttaaagaacttaaaacaagctttaataaatgaggatgtcggggacatccgcattttcgcaaagattgagaatctgcagggaatggagcatctgggggagctgttgccacactgcgatgagatcgtgatcgccagaggagatctggggaatgcgatgcctctggcaaagcttccgtgcgcgcaggaggagattgcggctcagtgtagaaagcacgggcgcgcgtttatggtcgtcacgcagatgctcgcttccatggagtatcgggcggtgccgacgcgggcggaagtgtccgatatattccgcgcggtgcagcagggcgcggcatctgtgatgctgacgggcgagaccgctgcaggagaatatccgctggaggcgatggaggttctggtggatacggtgcgggaggcggagtggtatctggaagagcgcagatagtggggcataaaatgtcatttatccagcatctttttatattcgcgaggactctgtcctacatatttccggaagaggcgtgaaaaatagcccatatcggtgtagccgacggcgttggatacttccgcaacgctcatgtccgtggtgttaaagtaacgcagcgaggcgagaatgcggtgcttgttgatataagttgtgagtgtgtcgccgacttcctttttaaattcgctggagaggtaagaagcatttttgccaaattccgaagcaagcgtggcgagcgataattccgaggacaggtgctggttgatataattgaccacgcttcgtatcagataggaataattgtcataggtaaagtttttcacgagcaggcagtatttgcgtaccatttcataaggaagatgctgcagttcctgcgcctgcacggtctcgttaattttaagctgaaaggtatgcatctgcttaaagatataggcgggatgcacctgtgtgtccatcattttggcagacagaaaagtgttgatgtaggagagatattcctttaactgggagagtggtgtctcggaaaaagaaaccgcaaaattcaacagggatttcatgctttcggaggaggctgtctgatcaccggtgatgacagcatcgccacaggattttatgtgttcggcgaggtttgccatataatcggaagtaaatttgtgaatccgttcctcgttaaagtcaacttcgtgctgttcggaggtataattgatatactcgacgtgattggctgcaaacccggggataaatgtagtgatcagatgctgcagtgtggtgatcagactctgcatttccacgacgggaagattgtagtagacctgctgcatgctggatgtatactgtggcggaatgccgttctccttcatgatgcggttgatgacagccggagttgcaggttcggtacggaacggcatgaagccaaacatatcgggatgctcctcgtttgtaactgtgataatcagattgtaaaagcccagaacactttttaacacgataatctgccaggcatcctgctcgggagacagggagaagatggcagaatttgtggagtaggttccccagaccatcttcctaagccccatgtccagccgctccagatcggagtagggataatgcatcagaaaagagtcgactttgtaggtgtctaagatggtctggcggatgaccggaaaacagtcctccacggaaatatagggcaatgccataagaatcctccttgcttgatccggaaactgttagctgcaaataacaacgtgaaaaaattttagtacaaaataaatataacacaaaaataatccacgtcaaacaaaaaaaggcaaggtacaggaaaaggaaagttgctataatggaaaccatcaaagagaccgcatggggcggtctgctacaggaggcgcattatgggaaacacaaacaccaagccgtttggcgtaaaggacaaaatcggttacatgtgcggtgatattgcgaatgattttacattcattttcgccagcagctatgtaatggtattttacacaaaggtcatgggagtctctgccggtatggtaggtaccatgttcctgcttgcaagatgtctggatgcatttaccgacatcggaatgggacgcattgttgataacagcaagccgaccaagaacggacgcatccgtccgtggattctgcgtatgtgcgcatttgttgcactggcatcgtttatgatgtaccagtcatttctggtagatgcaccgtatgcggcaaaagttgcttacatgttcatcacttacattttatggggatccattttctatacatccgtaaatattccatatggatccatggcatctgttatttccagcgagccgaaggaccgaagctccttatctgtgttccgttctctgggcggtacgctggcaggtatcctgatcggtatgcttgcaccgatggtggtatattacaccgatgaggcaggaaacaaggtcgtatccgcgtccaaaatttccatgatcgcaggaatcttttccgtacttgccgttatctgctatctgttatgctatatgctgacaacagaacgtgtcgcgtatgtaccgaagccggatgtccagaagaagacgttcggacagacggtttccgcactgttttccagcagatcgctgatgggcctgattctctcggcagtgctgttgttgttggcatctttaatgtcccagggcatcaaccagtatctgtttgcagattactttaagaacactgcagcattatccgtatattcgctgctgatgcttccgtgcgtgcttgtactttccgcagtgtccacaaagcttgccgtgaagtacggaaagaaagagtgcagtcttatcggaatgtttatctccgcaggattatattttattattggcgtactgcatgtaaagaatgtatggctgttcgtcggactggcattccttgccatgatcggtatgtatttcttccagatgcagtgctgggcactggtaacggacgttatcgatgacatggaagtgaagaatcacaccagagatgatggtaccgtatacggtatgtactcttttgcaagaaagatcggtcaggcaattgcgggcggactttccggctgggcacttggctggatcggttatgatgagctggcaacaagccagacgcaggaagttgcaaatggaatctacaatctgtccaccttcttcccggcaatcatctatgcattatgcggactggcactgttacttatatatccgctttccaaggcgaaggtagaggcaaacgtaaaagaacttgagtccagaagaaaataatataggcttgttaaggggctgcacattaagcgtgcagcccctttttcgtgcagttgatgtgataagcagcattataagaagcacatatgcagatttccgttggaaatgcagatggaatattcgttggagaaaaatgtgagcatttctaccagttggatgtttgcatcagattccgtgtctcttccacgttttgactatccgacgggtgcatgtccggcacaccggagacaatgggcgggctttctagctgcactaactgtactccctcgtagacatcataaaaccgcgcgaacagaaactcgttgccacctgctatgaaagtccgggcagatggcaactcaaacatctgcttcgcgcggttatgttttactgcgggagtgcaggtaagtgcagcacgaaaaccctacaaattgtctcacggggtgcggacctgacccgcggattgttccaaacttggaaagacacggatcatcgaagatgcaaacatctgactggttagaaatgccatattttttgaccgaatttccatctgcatttccaacggaaaccgcaaagtgcgagtttcttataatgctacttatcaaaatccagcttcatgaaaaggggcgactgcccctttttgggcgtatttgttaaggaaaggtcaaaataggtaggaagtccgttcaaatagatagaaagttctatctatggaaaccgatattttttacaaacattggaagacatttttgactgaatgtatatttttgcaattttcaatttgtaaaaaggcggaaaatgtgaaaaaaatcacaatctatgcgtgcatattgcacaaaaacgaaacggaaaattagaacttttgacgaaattgacatttaatgggaaacttcataaaataggtacacaaaaaagagaaaggaagtggtaatacggaggagctatcaaagcagctgatggaagagctgaactgtgagactgcgttcacgatccctgtttttggcgggatccctgtggcagagtcggtcgtggtcacatgggtcatcatggcagtgctgctgctcggctcgatcattcttgtgcgcaacctgaaagtagagaatgtcggcaagaaacaggttgtactggaaacggtagtgggaggcttatacaacttcttttatgatctcctgggggaggatggaaaggggtatatcccatatctgatgaccgtagggctgtatatcggcgtggccaatatgatcggtctgttcggtctcaagtctccaaccaaggatgtgggcgtcactggtgctcttgcactgatgagtatcgtcctgattgaattttcgggcgtacataaaaaaggcgtcaaaggctttctaaaaagctttgcggaaccgattccgcttatgctgccgatgaatattctggaaatatttatccggccgttatcactgtgtatgcgacttttcggtaatatcttaggcgcattcgttatcatggagctgatcaagatcgtggcaccgttacttgtgccggtaccgctcagcctctactttgacctgtttgacggattcattcaggcatatgtatttgtatttttaacatcactttttattaaggaaaccatcgagtaatcaaatcgaaaaagaaaaggagaacattattatgacatctttaatcgcaatcggagcaggaatcgcagcacttacaggtattggagcaggtatcggtatcggacttgcaacttccaaggcaacagacgctatcgcaagacagccggaggctgacggaaagatcacaaaggcactgttacttggatgtgcactggcagagggtactgcaattttcggtatggtagtagcaatcttaatcatcttattcttaggctaaggaaaggttatggtagagtatgcagttacttagaatcgactggaatgtcatctttaccatcgtcaatctgatcgtattatatctggggctccgcaaatttttgatcggaccggtcacgaaagtgatggatcagcgcaagcagctgatcgaagggcagatggcggacgcacgccatgtaaatgagcaggcaaatgagctgaaagcgcagtatgaggacgccttaaagcaggcgcatgaggaatcggcgcagatcgttgaaaaagcgagaaagagcgcacaggcggagtatgagagccgtatggatgcagcggatgcagaggcgcagaaaattatcgccaacgcacacaagtcgattgaccttgagcgtgagaaaaccgtgcaggagctgcagtcgcagattgcgggacttgccatggcggcaaccgccaaggtattgggcgacacggatcaggcagcgcagaacaagcttatgtatgaacagtttttggcgaaaacgggtggtttaaatgacacaaacagcaaataattacggaacggttctttttgagctgggcgtggagaaagagactgtggaagagatgaagcggattttctcactgactggcgaattgccgcgcgtgctggactgtccggtggtatccggcagggaaaagcacaggctgattgagcagctgtttccgaaagaggtctggaatttcttaaaagaaatgtgcgaccacggaaacgtatcggagatggaggatgtctttaaagcgtatacgcgctgctacgatgaggcaaatggaattttaaagaccgttatgtactgcgcgggtacaccggatgaggagcagcttgcacagatcaaagcatatctcgccgcaaagcaccacagagagacggtggagcttaccatctgcacacagccggaactgatcggcggatttgtgctggagacgggagatctggtggaagattacagcgtccgggggcggatcaagaatttagaacaaaaattgacatggaggtgatgacgtgggttccataaattcagaggagattatctccatactgaaaacagagatagaaaattatgatatggtgaccggtgagcaggaagtcggctctgtcatctgggtaggagacggaattgcgaccatctatggcattgagcatgccatgtatggtgagatcgtgatcttcgagaatggcgtcagaggtatggtgcaggatatcaagcgcgatcagatcggctgtatcattctcggaaaagacaccggcatcaaagagggcacaaaggtcacacgcacgaagaagaaggcgggtgttccggtcggaaatgcctatcttggaagaattgtaaatgcactgggagcgccgatcgacggcaagggagatattccggcggacgattaccgcccgatcgagcaggaagcgccgggcattgttgaccgtcagtcggtcaagcagccgctcgagaccggtattctggcgattgacgccatgttcccgatcggacgcgggcagcgggagctgattatcggcgacagacagaccggtaagacgtcgatcgcagtagataccatcttgaaccagaagggaaaagatgtgatctgtatttatgtggcgatcggtcagaaggcatcgaccgtagcaaagcttgtgaatacattgacgaagaatgatgcgatggactactccatcattttatcatcgacagccagcgagtcggcatcgttacagtacattgcaccgtatgcgggaaccgctatggcagagtatttcatgcatcagggcaaggatgtcctcatcgtatatgatgacctctccaagcacgcagtggcatatcgtgcactgtcccttttgctggagcgttctccgggacgtgaggcttatccgggagacgtattttatctgcattccagactgctggagcgttccagcaagctttccgatgagctgggcggaggttccatcacggcgctgccgatcattgagacgcaggcgggtgatgtatccgcatacattccgaccaacgtgatctccatcacagacggtcagatctttttggagggtgatctgtttttctcaggtatgcgtccggcagtcaacgtcggtctctccgtatcccgtgtcggcggtgcggcgcagaccaaggcgatgaagaaagcgtccggtacgatccgtattgatctggcgcaatatcgtgagatggaagtgttcacacagtttgcatccgatctggacgacatgacaaaagagcagttacagcacggaaaatgcctgatggagctgttaaagcagccgctctgccatccgatgagcctggcggatcaggtcatcacgctggtcgctgccaacaagcgtctgatgctggacgtagacacggcaaagacgaaagaattccagctgggtatgttagattacatccatgtacagcacgcggagcttgtgacgaagatcaacgaggaaaaagtgctggatgatgcgattacggagcagattgtagaggcggttaaagaatataagagcaggtgatagagcatggcaaataccaaggaaattcaaaagcgaatgaaaagtatccgggataccatgaagattacaagcgccatgtatatgatatcctctgccaaactgcgcagtgccaagcagaagcttgagcagacggaaccttatttctatgcacttcagggttccatttccagattcctgcgccacattccggaggtgcagaaccgctattttgaccagaagaaggagatcccggaggaagaaaagcggcgtggatatatcgtgatcactgcggataagggtctggcaggagcatacaaccacaacgtcatcaagatggcgcatgagcttttcacgcagggcgagaacaataagctgtttgtcgtcggcgagctcggacgccagtattttgcgaaagagggtctcgcggtggatgcggagttcaagtataccgtgcagaacccgtcgcttcaccgcgcgcgtgtcattgcggatcacgtcatggatctgtacgcggaaaatgagcttgatgaggtatatatcatctacacaaagatggaaaactctttttctatgaatgcggagaagatgaaacttcttccgcttgtaaaggaagacttcctgcatcctgccccggcggatatctaccaggaggagatccgggtggagtcatccatggaggcgattctggagcatgtagtaccgaactatgtcacaggatatatctactgtgcgctggtagagtcgtttgccagcgagcataattccagaatgatggcaatgcaggcggcaacggacagcgcaaaggacatgatacagacactgtcgatcgagtacaaccgggtacggcaggcggcgatcacacagcagatcacagaggtgagcggcggtgcgaaagcgcagaagaacaagaaaaagaaataaagcggaagggagcttgtatgaagaaagggaaaattgcacaggtcatgggacctgtcgttgacgtagaatttgaagataatgaccttccatatattaaagatgcgcttgaagtggacaacaacggaaagcgctgcgtgatggaggttgcacagcacatcggcaataataccgtccgctgcatcatgctcgcggcaagcgagggcttatgcaaggatatggaggttattgccgagggcggcggtatcaaggttccggttggaaataagaccctgggcagactgtttaacgtgctcggagatacactcgacggaggcgaaagccttgacggtgaggaacactgggtgattcacagagatccgccatcttttgaagaccagagcccggtcgttgaggtgcttgagaccggtattaaggtcatcgatcttttggcaccgtatgcaaagggcggtaagatcggtctcttcggaggtgccggagtcggtaagacggtattgattcaggagctgatccgcaacattgcgacagagcatggcggatattccatttttaccggcgtcggagagcgttccagagagggaaatgacctgtggtctgagatgaaggaatccggcgtactggataagacggcgttagtgttcggacagatgaacgagccgccgggagcacgtatgagagttgctgagacgggacttacgatggcagaatatttccgcgatgaggagcatcagaatgtacttctgttcatcgataatattttccgttttacacaggcaggatctgaggtatccgcgctgcttggacgtatgccgtccgcagtaggttatcagccgaccctggcgacggagatgggcgaactgcaggagcggattgcctccacgaagaacggatctgttacttcggtacaggctgtttacgtgcctgcagatgacctgacagacccggctccggcgacgacatttgcacatctggatgccaccacggtactttccagaaagatcgtagagcagggtatttacccggcggtagatccgcttgagtccaactcccgtatcctcgaggaggacgtcgttggaaaagagcactatgagactgccagaagagtacaggagattttacagaagtacacagaactgcaggatatcattgcaattctcggtatggaggagctgtccgaggaggataagctcgtggtataccgtgcaagaaagatccagaagttcttatcccagccgttccacgtggcagagaactttaccggcgtgccgggcaagtatgtgccgcttaaggagacggtaagaggattcaaggcaattattgacggtgagatggatgagtatccggaagcagcgttcttcaatgtaggtacgatcgatgatgtgatcgagcgtgcgaaggagatgggggcatgaatacatttagtctgaaagtgattgcctgtgaccgtgtcttttttgacggaagatgtgagcaggtcgttctgccgctgcatgacggagagaaagcaatccaggcgcatcacgaaaatatggtgtttgccgttgagatcggcgagatccgcatcacggacgaaacaggcgaggagatcgtgggtgtgacaggcaccggatttgcacagatcatcaataaccgtgcaatggtgattgttgacacctgtgagtccccggaggagatcgatgtgcggcgtgccgaggaggcaaaagagcgtgcacaggagcagctccgccagaaacagagcattcaggagtattatcgttccaaagcatcgctggcgcgcgcgatgtcgcgcctcaaggtcgggaaaaaagaccgtccgaccggatattaagaagaaaaatggtcttgtgcaaggttccggcgggtctgagagagaaaaaacgtctctccagacccgccgggaccttgttattatgcgcgtgggaagaaaaaagggctgttcgcgggtctgggaatgaaaaaccagcccgtgagacccgaaaagaaactgatttcgggtctgggagagaaaaagagtgtcgccagacccggcggaagccaaaatgcagccatgtaagtcaaaaaaatagaagattgtacgcaaaaacgggtctacagagagaaaaagtcctctgtagacccgttttgatcttatgcacaacatcagcaaacaatgattgaccaagaaagctcctgtgggtgcatgtaaggctcagccctgcagcttgccagtcgatgtaacttacaaatttacccagtcgttgcaggtcacacaacgttgcagcccagccagtgtatgcaacgtacctatccatgcagccagtcattacagattacataccggtatattgccagccagccgatacaagtattaacgcacatgccgttgcaacttacttaagccccactgtagccagtaatgcaacttactagccagcttatacggcttactcatcggtgcagattgcttccccgcgctgcttacagtacgaagaatgtacaggttgccggtgcaagagtcactgttccggcttcctgtgctgccggagtgagttccggaagcgaattgccggcacccagaacaagtggcttgccatttaaagtcatgacagcggcacgcacgttgccgccctcgccggcgagtgtgtagcgctctgcgctcttcggaagctctacggtggttgcctctgtcagcgagttgttgatcacaagatatacaacgccctcttttccatctttgcgggaatgtgcgaagacatgtgcgccctcgcggattggctctgcggtatcgtaaacggtcgtacccatcaggcggttccacaacaatacggcaaaatagttcgggcgcggatcaaatacttcgcgggccaggaagccgtagtcggaagaagccagtgtattgtggaaaataacgccgtctgtgatcgctgcgaatccagcgagctcgtttaaggtacggaaaacatccagatacgtggaagcccatgtatcaccgccaccgcctgcgtcgccggactccgttacccacatctcgccgcccgggcagtatttgtcgcggagtggagcataggtgcgcgcacagtttaatgcaacgtccagatacgcctcggtatgggcggtatctgccagccagtgtccgcttggcatcacggaagcaagacgctcggatacaccgttgtaataatggtagctgaatacgtccaacggctctttggtgtcctctaacaggtcggttgtggagcagttctctcttacaagctgctcgataccaccactcttgctgttgtcatcaccgccattgatggtaagaccctcgccaacactgctcggtccgatacagatacattccggatagttggcgcgtacccacgcgaaaaacagatcctgatcgcggtggtaatcagccggtgtataaccagccgggaagccggtatcctccatcatgttcggttcgtttgcgaactcggcgccgtcgatcggtacgccgtgttctttgctcagacgaaaaatcttctccgcctcactcggattccacggttcctctgcggaatgcagacccgggcagttcgcaacggaaatcatcagtttcgcatcgatcgcttttacgaagtcgagcacaccaatccactgctcctttgtcaggacatttaagtagccctccggagcaataccgcctgttgcattgtcaaaatcatagtaagtcttggttgcccaggtgccggacacacgcacccatgcggttccgagctcctttgcgagggagcggagcttctcgttgtacagatcgatcggtgcgtatacctgcatcagatccttgtacattgcagcaatgccgtctgcgctcggagcgacatggaattcctcggttcctgcaacctgctccggtgtgtacgctttccagaaggtgccgccggttacctcggcgaattctacattataagacatcaggcgcggatttacttcgcgcagcgcctttaaattctcgggaactaattttacaaactgtgccatagaaatcattctcctgttcgtttttatttgccggtgatccggatccccgtatcacctttgcataaaaacagcgtaccacaaaaattgtattgtgtatgcaggaaaacaactatttacaaaaattgtgcaaaaacaggacaaaatcgttcccgcccttagcgctcaaatctgccgcttgccccgcacggaagcaccagaccgttgctggaaaccggcagaccgatttcatctgcggcgatatgaccaccgtgtttttttaagacggtattcatcatatagctgagcactgccggctgaagaccagtggtgtaggagttgatcaggaaaaacagaggatcgtccgacagcaactgctcacagagctgcaccagcggatagatggcgtcctcgattttccagatctcacccttgggtcctcttccgtaggaaggcgggtccataatgatcgcatcatagtggttgccgcggcggatctcgcgctcaacaaactttacgcagtcgtccacaatccagcggatcggggcatcaccaagaccggaagagacggcgttttccttcgcccaggtcaccattcccttggaggcatccacatgcgtgacgctggcaccggcagcagcggcggcaatcgtggcaccgccagtgtaggcgaacagatttaacaccttgatcggacgtccggcgctgcggatcttttcggaaaaccagtcccagttggcagcctgctccggaaacagtccggtgtgcttaaaactgaacggctttaagttgaaagtcagcttgccgtaatggatggtccactgctggggaagatcaaaaaattcccactccccgccgcccttggcgctgcggtggtaatggccgttcattttgcgccagccgcgctcggtcttcggcgtgtcccagatgacctgcgggtcgggacggacgagaagataatctccccagcgctcgagcttttctccttttgagcagtcaatgacttcgtaatctttccagttatctgcaatccacatagcaatctccattcctgtgtacttctaatttaaaactataacaaatatataccacaagccagcagagggcaaggaaaaagtaaaaacgtctgcctgcgggcagagaaaaagccttcgccacggcgcggcgcaggcattaacggatgcggatacagcatccggagcaggaaaaagcccataaaaagccaataaaaaaccggtagaaaaatatctaccggttcaaaactgcgcagcccaaattgccggctgcacgttattttttacgccaggtggacggcatgaacagaatcatgagcgggaaaagctccagtctgccggcgagcatgtcaaaaatcagcacaaccttggagagcggcgagaagatcgaaaaattctgcgccggtccgacacggtttaagccaggaccgatgttgttcagacacgagacgactgctgtaaagttcgtggtaaaatcgaactcgtccaggctgatgataagcgttgacagcatgagcaaaataaagtaaatgaccagaaaaacattggtagagcgcagggtgctgtgttctacgacatgtccgtccatgcggatcttgcggatctcgcgggggtggataatcagggaaagctctttgcggatggttttgaataaaatcaccagccgggatactttcataccgccgcctgtgcttcccgcacatgcgccgacgaacatcagcgtcacaagaatcgtctgggagagcgcaggccacatgtcgaagtcggcagtggaatatccggtggtggtgatgatcgcaccgacctggaaaaaggcattccgcagcgcgtccctggtatttgcgtaaagcgggcgtatattataggtaatcattccgacagaagcaaagatcaaaaagagataccagcgcacttcctcgatgcggaatgcatccttgattctgcgcgataaaatacaaaaataaaatgtgtaattgataccgcttaagatcataaaagttgtgaccgtgttctggatagcaggcgaaaagcttgcaaagctgtcgttacggaaaccgaaaccaccggtgccggtcgtgccgaaactcgtcagaagagactcaaacagcggcatgccgagcgcacacagaatgacaatctcaaggagcgtgatggcaaggtaaatgccgtataatattttcgcggtatccttgatgtgcggaaccagacggctgacggaaggtcccgggctctccgccttcatgaggttgatcgtagagccgcccatcagaggcaggatcgacataataaagacgaacacacccatgccgccgatccagtggctgaaactgcgccagaaaaggctggcatgcgacagggactcgacatcggagagaatacttgaaccggtcgtggtaaaaccggagaccgtttcaaacagggcgtctacataatatggaatgtcgccgttccacacgaaggggatagcgccgaaaatactcataacgatccagctcaaggcgacagtaacaaacccctcccttgtatacacggtcgaggaagacggttttttatgtgtgaaaacaatccctaaaaccagacagattgcagcggtaatgacaaacggaatgcctgccctttcctgatagatcaacgataccagcgccgggagcatcagaaacgcgctctcaaattttaaaatatagcccagaatatataaaaccatggaataattcattgcaggttaatcctccagaatctctttgatgtcggagatgcggtatccggaaatgacgaccagaacggagtctccggcgagcatcatatcctgtccacccggcagaatgaccttaccgttgcggtagatgcagcagattaaagtattcttgcggaaattcagatcctgcagcggaatgcctgcgacggcagaattctccttgatgatgaattccagagcctcggcttttccgccggcaagcttgtaaagcgtctccacgttgctgttgatggaattcactgtggagcgcacatattttaaaatgtaatcagcggtaatgacacgcggataaataatacttcccagattcatctcgttgatgacggagttaaagctgctccggttgatcttggtcaccgtttttgcattggagacatcgttggcgtacagcgacagcaggatgttttcctcgtcaagaccagtgagagctgcaaaaccctgcgcctgctctaagccctcctcggacagcagatcctgatcggtggcatcaccgcagatgattgtcgcctccggaagcagctcgcttaaaacgtcgcagcgggacggattgatctcgatgatcgtcacacggatgcccgactggatgagaatctttgcgaggtaaaaggaaaccttaccgccgccagcgagaatggcattgccgacgcggttcttgacgatgccgatcttacggaaaaagtcaatggcgttgcggcgctcggaagcgattgcgacggtatctccggcgcggaattcaaaatcaccgttcgggatgatgacctcgctgccgcggatgacggtacacaccagcacgttgctgtgcagggtctggtgcagattgaacagctttaaatgaatcagcggggaattctcgctgactttaaagtgaagcagctctacatgcccctttgcaaaagaatccacacggatggcggaaggaaactgaaatactcttgaaatctcgttggctgccgtcaactcaggattgataatcatggcgagcccgaattcctttttcaggaaggcgatctcgccgttgtagatcggattgcgcacgcgcgcgatggtctggcagtggccggtcttcttggcaatcacgcaacacagaaggtttttctcatcatctccggtaactgcgattaaaagatcggcagtggcgatgcctgcctccagcagtgtcttatggttgatgccgttccccacgatgcccatcacatccagacggtcggtaatatattgaaccttttccggcttttcatcaatgacaacaatattgtgatcttcgttgctgagctgttcgacaagcgtaaaaccaacttttccacagcctacgataataatgtccatagaaatctccttaaagaataatcaaagacattatagcatatacaaattgtttttgggaaaaaaagcgtagaaattggcaaaatcttaatggtaaaaacaattttttcgaggaaacgcccgcgtggacagttcttgtgttttaaatgagggtacgttacaatgagtgacagagaactaaatgacaggagaggaaagaggagtttatgctggaacaattagtggagtgtgagaaccggcttttagaggaacagagacggttcaatgagttactgcttgcctggcggtccggggatctgggggacgatcttacacggatgaagattgagcagatgcagcgggaagtggatgcgctgggacgacagctgacagcgctgcgcacagtaattgcggcacaggcagaccgcgaacgggcgggataccgtcagggggcgatgccgaaggcggcgtatggatggccggcgtatggacaggcggtggcagcggcacagccgtggaatcagacaatgccgcggccggcagcgcagacagcggagccgggaaaaccgcaacaggcgtatcagcagacaccgccgcagccggcagtgcagacagcggagacgggaaatccgataccgccggcgccgggcgcaatgtcacagtccgcgcgggagacgggaaacccgcagcaggcgtatcagcagacaccgccgcggccggtggcagcacaggcgggataccagcaggcatccgggaagcaggatctggaaaaaacgatcggcagggcgattctgccggtctgcgctgcaggactgatcttcctgagtctggtgttttttgcgatgctggtgctgccgtatcttagccagggagtaaagatggttctgatgtataccgtcagtgccgcgatcacgctggcaggaggaattcttgtggcacatgaccgcaggaataaagcatttcttgggctgctgggctgcggcatgggagcgtggtatctctcgctgtttttaagtgatttttatttccgtgcaataaacgacggcatactttatctgggactgctggtgtgggcggtggttctgtgtgtgctgtcacgtctgcggtcgaatctcttccttatcatagggcagattggtgtgggcatctcattgattctcggcgtgctcatgtgtaactggacggaggatgcggaaaggtttctgattctttctatatattatgcggtaacgcagaccatctttttcgtgtcccacctacggcgggaatattaccgcaatgcggtgaatcttgtgtcgtggagcatcgggctgctcattctggtgcttggagcagctgcttcctatacagaaggctccgctgcgggaaacgtgtcagtggtattgcttcttgcgcttgcagcggttccggtactgcttggcgtagccgcggcggaaatggacgagaatggaaaactgcttggcggtattgtgggggcactgtgtatcatcattttttgcggactgtttttgaaccggtttaccggagcggcgctgctcttactggtatttggcattgcagttctggcgctgctggaattccggcgccccggggatctgtccgcgggtacggttctgctggaggtggctgtttttgcgcagatgttctttgcgggagcggcggcaccttatttcggggagtatatatcgacgggacttctggcggaggcgtgccttctgtacggtttcctgcgcaaaagaaaagcataccgggcggcggcactcggctatggcatcctgctgttgctgatcccgatgaacgggggcatgagaacggtctggggactggtgtttttctgcagcgcggtgctgctgatccggttctgcagggaacagtatgaaacctggatgaagatctgtggttatctgatgtttttggcattcctgtcagaaacggcggtgtggggaacggatctggcagcggtcgcagatgtttacctgagcgatctgatctgttttatgccgattgtgctctgcaatattctggcggcgaaagttccgctgtttcgcagaaatccaaagacgggagaggaagaaaaagcattcgcggcggtaacgatggccgtgcaggcgctccttattgcagcggttctggttctgatgggaaaaccggacgcgccggtgcttcaccttatctatgtgcttttgggactggtgctcgtgtgcaccaatacctacagcctgctgataagaaaggacggagactggtggggaatttacgtggcgttaaagctgctgctgtttgcatcggtcgcactgcactcctatggggtgcccgtgttcgtgaacgatgtgacgggcattgtgattgcgttctgctgtatcgtggcgggatttctggcggaaatgcggatgaagagaaaatataaggcgctgcgggtctgcggactggttctggtgctgctgtgcgttgtaaaactggtgctcgtggacatccgctacgacaatgtgctgctccgggcggcgggattttttgtcggaggcatcctttgctttggtatcagtcttgtatacaatctggtcgacaagtggatggggcggcgcgaaaatgcaaaaaactgaaaaaaaatccttgcaattcgcggtttcatcgtgtatactatgcattgctgtgacattgatagcgttgaagcgtgaggttgctgcagagcattgcaggttttccgtggagcgaatgtcaagttaggaaactggcgacaagtcactgtatcacgaatagaatttgtccgaaggacagagggatggcgtgtaggaagcgcgggcttctttgtgggcgtgagtccatgatacacgcgggtatgtgtgcagtcaccgcttgtcgtacaaaaagcgattacatcgcttgtaaaagtgcgaaaaggaggcgactttttttatggcaagtcaagtaatgagaatcactctgaaggcttatgatcacaagttagttgattcatcagcacagaaaatcatcgaaactgtaaagaagaacggatcacaggtgagcggaccggtacctcttcctacaaagaaggaagtagttacaatcttaagagctactcacaagtacaaagattcccgcgagcagttcgagcagagaactcataagagactgatcgatatcgttacaccgacgcagaagacggttgatgcattatcccgccttgagatgccggcaggtgtttacatcgatatcaagatgaagaataaataatttcttcatcccagacaaatgatttagttaatatcctgaagggttttatatagaagtaatgcaggcggtgaaaacttcccattccacttatatggactttctaggatgaacggttccgctaccccacatggttgggcatgaagcgttccgctgtagagaaaacaggaggtaaaagtatgaagaaagcgattttagcaacaaaagtcggaatgactcagatcttcaatgcagacggtgttttagtaccggttactgtattggaagcaggtccatgttctgtaacacagatcaagacagtagagaacgatggatacagtgcagtgcaggttgcatttgctgacaagaaagaaaaggttgtcaacaaggatgcaaacggcaagaagcaggtagctcacagacatggtgtaaacaaggctcagatgggacattttgcaaaggctggcgtatccggcaagcgttttgtgaaagagttcaagtttgagaacgcagcagattacaatcttggcgatgtgatcaaggctgatatttttgcagagggcgacaagatcgacgctactgcaatttccaaaggaaaaggattccagggcgctatcaagagattgggacagcacagaggtcctatggctcacggttccaagttccatcgtcatcagggttccaacggtgcgtgctcctcaccgagccgtgtgttcaagggaaaaggaatgccgggacatatgggaagcgtacaggttactacacagaaccttgaaatcgtaagagttgacgcagagaacaacctgcttttagtaaaaggtgccgtaccaggtgctaagaagtgtttagtaacagttaaagaaacagtaaaagctggtaaatagtgctcgaataggaaaggaggaactaaacgatggctaaagtagctgtttataatatggaaggcaaggaagttgacagccttgagttgaacgatgctatcttcggagtagaagtgaatgagcatttagtacacatggcagtccttcagcagcttgcaaacaaccgccagggaacacagaaggctaagacccgttccgaagtacgcggtggtggtagaaaaccatggagacagaagggaaccggacatgcaagacagggttcaaccagagctccgcagtggacacatggtggcgtagtattcgctccggtaccaagagattattctttcaagctcaacaagaaagagaagagagcagcattaaagtctgcacttacttcaagagttgctgagaacaagttcatcgttctcgacgagttaaagcttgacgagatcaagaccaagaagttcgtagaggttatgaagaacttaaaggttgagaaggcacttgttgtattgaacgatatggatgtcaacgtaatcaaatccgcagacaacgttccgactgtaaagactgctcagacaaatgagctgaacgtatttgacgttctgaagtatgatacggttgttgtaacaaaggacgctgtaaagacgatcgaggaggtgtatgcataatggcaaacgtacagtattatgatgtaatcctcaaaccagtagtaacagagaagagcatggcagcaatggctgagaagaagtatacattcttagttcacccggaagcaaacaagtccatgatcaaggaagcagttgagaaaatgttcgagggaacaaaggttgcaagcgtcaacaccatgaacatggacggcaagaacaagagacgtggaatggtaaccggtaagactgccaagaccaagaaagctatcgtaacattaacagcagacagcaaggacatcgagatcttcgctggactgtaagatgaaaagcgtttcgttctgatagcaacctaggcgcagcgatgcgcgataacaaacatcgaaaggagaacaacaatgggaattaagacatacaacccatatacaccttccagaagaaatatgactggctccgatttctccgagatcacaaagacaacaccggagaaagcgctcactacttctttaaagaagaacgctggtcgtaacaatcagggaaagatcaccgttagacatcacggcggtggaaacagaagaaaatacagagtcatcgacttcaagagaaacagcaaagacggaattccggcaaaggttgttggtattgagtacgatccgaacagaacagcaaacatcgctctgatctgctacgcagacggcgagaaggcatacatccttgctccggcaggactcacagatggcatgactgttatgagtggtgcgactgcagaggttcgtgttggtaactgcttaccgctcgagaatatcccggttggtacccaggtacacaacgtagagcttcatcctggcaagggcggacagatggttcgttccgctggtatgagcgcacagctcatggcaaaggaaggaaagtacgcaacgttaagacttccgtccggcgagatgcgtatggttccgttaaactgccgcgcaaccatcggtgtgatcggtaatggagatcacaaccttgtaaatatcggtaaagcaggacgtaagcgtcacatgggtgttcgcccgactgtacgtggttctgttatgaacccgaatgaccatccacatggaggtggtgagggccgtgctccgatcggacgtccgggcccatgcacaccttggggcaagcctgctcttggccttaagaccagaaagaagaacaagtcttctaacaagatgatcgtaagaagaagagacggtaaggcgttgaaataagtttcaaccattgataagcccatcgggtgtttgtcaaaaatatacaaataagctggaatttgaccgggagaagttgtacttgcttcttccggcatgttctgctataataaacaagatgttcgtagtccgaggaaacacacgggtgtgtgtaaggactgataatattaggaggtaaattatggctcgttcattaaaaaaaggaccatttgcagatgaaagcttactgaaaaaagtagatgctatgagcaaagccggtgacaagtctgtaattaagacatggtcacgccgttctaccatcttcccacagttcgtaggtcacacaatcgctgttcatgacggaagaaagcatgtaccggtatatgtgacagaggatatggttggacataagcttggtgagttcgttgctacaagaacttacagaggacatggaaaagacgagaagaagtcaggcgttagataagaactatttttgaaaggaggtttcatccatggctaagggacatagaagtaagatcaagagagagagaaatgaagtaaaagataccagaccatccgcaaagttatcttatgcaagagtgtctgttcagaaagcatgcttcgtattagacgcaattcgtggaaaggacgttcagacagcattagctatcgtatcctacaatccgcgttacgcttccagcgtggttaagaaactgttagagtcagcaatcgcaaatgctgagaacaattatccggagaagaattacaagttggagaacctgtatgttgcagagtgttatgcaaacaagggaccaacaatgaagagaatcagaccaagagcacagggcagagcttacagaatcgagaagagaatgagccacattacaatcgtgctggatgagaaataataaggaggtcaaacatgggacagaaagttaatccacatggcttaagagtcggcgttatcaaagattgggactctaaatggtatgcggaagcagatttcgcagatttcttagtggaagactacaatatcagaacttatcttaagaagaagttatacgcggcaggtgtttccaagatcgagatcgagagagcatctgatcgtgtaaaggttatcatctataccgcaaagccgggcgttgttatcggtaagggcggcgctgagatcgagaagatcaagggcgaggttcagaagttcacagacaagaagttggttgtagatattaaggaagtaaagagaccggaccgcgatgctcagttagtagctgagaacattgcattacagttagagaaccgtgtttctttccgtagagcaatgaagtcctgcatgggaagaaccatgaaggctggcgcaaagggtattaagacatcctgctccggacgtctcggcggtgctgatatggctcgtacagagttctactctgagggtactattccgcttcagacacttcgtgcagatattgattatggattcgctgaggcagacactacttatggtaaggtcggcgttaaggtatggatctacaagggcgaggtacttccggtaagagcaaataaggaagggggagctaactaatgttaatgccaaagagagtaaagcatagaaagcagttccgtggttccatgacaggaaaggcaaccagaggaaacacaatcacctacggtgagtacggtattgttgctctggaaccatgttggatcaaagcaaaccagatcgaggcagcccgtatcgctatgacaagatacatcaagcgtggtggtaaagtctggatcaagattttcccggagaagcctgtaacgcagaagcctatgggtgttcgtatgggtaaaggaaaaggctccctggagtattgggtagctgttgtgaaaccaggtcgtgtattatttgaaatctccggtgttccggaagacgttgcgaaagaagcgttacgtcttgctacacacaaattaccttgcaaatgtaaagtagtttctcgtgcggatttagaaggcggtgtatcaaatgaaaactagtaaatatttagaagaattaaaaacccagtctgtcgcagatttgagcgcgcagttagtagaggctaaaaaagaacttttcaatttgagattccagaacgcaaccaatcagttagataatacaagcagaatcaaagaagtaagaaagaacattgcaagaattcagacgatcattactgagaaagaaaaagttgcgcagtaggattccagaaaggagaatagtcagtcgtggaagaaagaaatcttagaaaaacacgtgttggtattgttgtaagcgacaagatggataagacaattactgttgcaatccaggataacgtaagacatcctctttacaacaagatcgttaagaaaacatataaattaaaggctcatgacgagaataacgagtgcaagatcggtgacaaagtcagagtaatggaaacaagacctttatccaaggataagagatggagacttgtagaaatcatggaaagagcaaaatagttagaaggaggctacaagcatggtacagcaggaaagtagacttaaggtagccgataacacaggagcaaaagagctgctcgttatccgtgttatgggtggatctactagaagatatgcgaatattggtgacgttattgttgctacggtcaaagatgcaacaccaggcggtgttgttaaaaagggcgacgttgtgaaggctgtagttgttcgttctgtaaagggcgcacgtcgtaaagatggttcttacatcaaatttgatgagaacgcagcagtcatcatcaaagatgataaaactccgagaggaacacgtatttttggaccagtagctagagagcttcgtgagaaacagttcatgaaaattgtttccttagctccggaagtattgtaggaggatcggaatatggcaaccatgaaaattaaaaaaggcgatatggtcaaagtaatcgctggtaaagatatcaacagcgaaggcaaagtcattgctgttaacagaaaagacggaactgtattggttgaaggcgtcaacatggtgacaaagcatacaaagccaagtatgcagaatcagcagggcggcatcgttcaccaggagggaccgatcgatatttctaatgtaatgtatcttcacaacggaaagcctacccgtgttggtttcaagatggatggagacaagaaggtacgtttcgcaaaatctacaggcgaagtaatcgactaattagagagaggaggccaatcaggtgagcagactgaaagaacagtaccagaatgagatcgtagatgctatgatcaagaaattcggttataagaatattatggaagtgccgaagctcgacaagatcgttgtcaacatgggcgttggcgaagccaaagagaacgcaaagttattagaggctgctattaaggatatggaagcaatcacaggacagaaagcggttgcaaccaaggcaaagaattctattgcaaacttcaagatcagagaaggtatggcaatcggatgtaagacaactttacgtggcgagaagatgtatgagttcatggatcgtttgatcaacttagcattacctcgtgtacgtgactttagaggtgttaacccgaacgcatttgacggtcgtggaaactatgcccttggtatcaaagagcagttaattttcccggagatcgagtacgataaggttgacaaggtacgtggtatggacatcatcttcgtaaccactgccaagacagacgaggaagctcgcgaattattgacacagttcaatatgccattcgccaaataagtaggagggaattttaatggctaagacaagtatgaaagtaaaacagcagcgtaaaccaaagttctctaccagagcttacacacgttgcaaaatttgtggtcgtccacattctgttttaagaaaatacggaatctgcagagtatgtttccgtgagttagcatacaagggccagataccaggcgttaagaaagcaagctggtaaaagaccgtgcagcatatttgctgcaatcaataataaggaggaaatatacaatcatgactacgagtgatccaatcgcagatatgcttacaagaatccgtaatgcaaacactgctaaacatgatacagttgacgttcctgcatctaagatgaaaattgctatcgctgacattcttgtagatgagggatatatcgcaaaatatgatattgttgaagatggtaacttcaagaccatgcgtattactttaaagtacggcgcagacaagaacgagaagattatcacaggattaaagagaatctccaagccgggacttcgagtatacgctggcaaggatgagctcccgagagttcttggcggactgggaatcgcaattctttccacaaaccagggaatcatcactgacaaggaagcaagaaagcttcaggttggtggcgaagtattagctttcgtatggtagattttgcccgccattggacggacaaaatcggaagaaccaaaggctggttcttccgagaacatcttccgggagcatctgtctctggtctgtccagaagcaatgttgctttcggttcttccgggttacttaacctggaggaggttcttaccgaatcgggtaactacggcgcaagccgcaatgatataagcacaaattaggaggtacgggcatgtcacgtataggaagaatgccaatcgcagttccggctggtgtaacagtggatattgcagaaaataatcatgtgactgtaaaaggtcctaagggaactcttgagagaacccttccgtccgagatggacatcaaattagagggtgacgaagtaatcgttacaagaccgaacgatttgaagaaaatgaaatccttacatggattgacaagaacactgatccacaacatggttgttggtgtaactgatggatatacaaaggagctcgaggtaaacggtgttggttacagagcttccaagtctggaaaagtccttactttaaaccttggatactcacatccggttgagatgaccgatccggagggacttgagtccaaagttgatggaaacaagatcattgtatcaggtatcgataaagagaaggtcggccagtacgcagcggaaatcagagataagagaagacctgaaccgtataagggcaagggtatcaagtatgctgatgaagttatcagacgtaaagttggtaagactggtaagaaataattaaaggagtgacgaaaaatggttagtaagaaatcaagaacagcagttcgcgaaaataagcatagaagaatgcgtcatcatctcgtaggcactgcagagagaccacgcctggctgtgttcagaagtaataatcatatgtacgctcagattattgatgatacagtcggaaatacacttgtttctgcttctactcttgagaaggacgtaaaggcagagttagagaagacgaataacgttgaagcagcagcaaagcttggtaccgttatcgctaagaaagcattagacaagggtatcaacacggttgtattcgatcgcggcggtttcatatatcagggaaaagtgaaagctttagccgatgcagcaagagaagctggattagaattttaataggaggaaacgcaaaacatgaaacgtgaaattattgatgctagtcagttagagttagaagaaaaagtagtgtcaatcaaacgtgtaacaaaggttgttaaaggtggacgtaacttccgttttacagctttagttgttgtcggcgacggcaatggccatgttggtgcaggtttgggtaaagcagccgagatcccggaggcaatccgcaagggcaaagaggatgctatgaagaagctcatcacagtaaagctggatgaggttgacagtatcacacatgatgttattggtaagcacaccggtgcttccgtattattaaagaagtctccggatggtactggtatcatcgctggtggtcctgcacgtaacgtatgtgagcttgcaggtatcaagaacatccgtacaaagtctttaggttcaaacaataagcagaacgttgttcttgcaacgttaaacgctttgagccagttaaagtctccggaagaagtagcgaagcttcgcggtaaatccgtagaagagatcgtaggttaaggaggaatttaagatggcagagaagaaacttaaagttacacttattaaatccacgatcggtgcagttccgaagaacaagaagaccatcgaagcactgggactcagcaagctttacaagactgttgagcttccggacaacgctgcaacagcaggcgcgcttcgcaaggttgcaccatatgtgaaagtagaagaagtttaaaataagaggataaggaggtgtcggtaatggacttatcaaatttacagggagcggcaggttccactcagagtgataatttcagaagaggacgcggacacggatcaggaaatggtaagactgctggtaagggacataagggacagaaggctcgttccggagcaccaagaccaggtttcgaaggtggtcagatgccattatacagaagattgcctaagagaggtttcaagtgcagaaactccaagacaatcatcggaattaacctttcagctcttgaggcattcgaggacggcgcagttgtatctgttgagacattgatcgaggcaggcgttgttaagaatccaagagatggcgttaagatccttggtaatggcgaacttactaagaaactcaccgttcaggcaaatgcattcagcgcaagcgcaaaagaaaaaattgaggctcttggtggaaaagcagaggtgatctaatgctagagacactccgtaatgcatttaagattaaagatattcgcaaaaagattatttttacatttttgatgttaatcgtcatcagaatcggaagctgtcttccgattcctggtgttgacagtgatgtatttgcgaactggtttgcaagccagaccgcagatggaatgggattctttgatgcaatcacgggaggttctttctacagaatgtctatctttgcattgaacattaccccgtacatcacgtcatccatcataatgcagcttcttacaatcgcgattccaaagttggaagaaatgcagcgtgacggagaggaaggtcgtaaaaagatcgcagagatcaccagatatctgacggttgctttagcgctcatcgaggcggttgcaatgacaatcggcttcagaagaggcggttatctggaattcagcagtggataccagggtgttcttgatattatcatggttattttcacattgacagcgggatctgctgttcttatgtggattggtgagagaatcacggagaagggcgttggaaacggtatttccatcgtacttactatcaacattatctcccgtatgccggatgatattaagacgctgtatgatcagtttatttcaggtaagaatgtaccgaaagcaattcttgcggcagttatcattcttgcaatcattgttggaatggtactgtttgttgtatacttacagggcggcgagagaagaattccggtacagtattccaagaagatccagggaagaaagcaggttggcggtcagtcaacatacattcctctcaaggtaaacaccggtggtgttatcccggttatctttgcacagtcactgttgcagacgccggtaatcattgccagtcttcttggcaaaggaaatggaacaggtattgggagcaagatcttaagaggtatgtcacagtcaaattggtgtaatccaagcgagccgatttattcgatcggactggttgtatacatcgtattgatcattgcgtttgcatatttctatacatcgattacgtttaatccgttggagattgcaaataacatgaaaaaagcaggcggatttattccgggtattcgtccgggtaagccgaccagtgattacctgaaccgaatcctgaattatattgtctttataggtgcggttgcactcgcgttcatcgcgtttgttccgattttctttaacggtgtgtttggagcggatgtatccttcggtggaacgtccatcatcattatcgtaggtgtcgttatcgagaccttaaagcagatcgaatcacagatgcgggtacgttattataagggatttttaaatgattgatccagcagagctgttggatatgggaaggaacgctggacttattttataagttcagcgttttcgcttaaaaagaaagaggagaggtattcctatgaaaattattatgttaggggctccgggagccggtaagggaacacaggcaaagcagattgcagataagtacagcattccgcatatttccacaggcgatattttccgtgcaaacatcaagaacggcacagaactgggacagaaagcgaaaaagtacatggatcagggacttctggtaccggatgagctgacctgtgatctggtaatggatcgcataggacaagaggactgcaagaacggatttgtgctcgacggatttccgagaacgatcccgcaggcagaagctctggatgcagcacttgttaagatcggtcagaagatggatttcgcagtcgatgtggatgttccggacgagaatatcgtaaaccgtatgagtggaagacgtgcatgcttaaactgtggcgcaacctatcacattgtttccattccgaccaaggtcgagggaatctgtgaccgctgcggtaatccggtggtactcagagacgatgataagcctgagaccgtacagaagcgtcttaaggtatatcatgagcagacacagccactgatcgattattataagaagcagaacatcttaaagtccgtagacggtacacagccgatggaaaaagtgtttgcggatattgtggcaatattaggagagtaacatgtctgtaacgattaaatccccccaggaaatagaacttatgcgcgaggcggggaaaatacttgcaaaagtgcatgagcagctgggaaaagaattaaagccgggaatgtcaacacttgaggttgacagactgggagaagaaatgattcgaagctttggatgcgaaccgtcatttaaaggttatcagggctatcccgcatcaatctgcgtatcgatcaacgaggaggtcgtacacggaatcccacgtgcagaccgcatcatcgaggagggcgacatcgtaagccttgatgcgggcgtgatctacaaagggtatcagtctgatgcagcgagaacgcatggcgtcggtgagatctcggatgacgcgaagcttttgatagagagaaccagacagagctttttcgagggtatcaagtttgcgacaacaggcaatcatctgcatcagatttctgcggcgatcggtgattatgccggaagttttggctatggagtcgtgcgtgacctgtgtgggcacggcatcggcaagcatatgcatgaagatccggagatcccgaatttcagacagtttcggcgcggtatcaagttaagacccggtatgacacttgccattgaaccgatggtggatctgggatctgccgaggtggtatggatggatgatgactggacggttgtcacagaagactggtcgctttccgcacattatgagaacacgattctgatcactgacggtgagccggagatctttacgcttacagaatctgagattgcgacaggcagatggaatcagtatctgggcaggcagacagaggcatagaccggtcagtaagcgaatggagaaagagatagtatgattgaatttgcaaaatccatggcaggccatgacaggaaccatatttatctggttaccggaaaggatgagcggttcgtgtatctggcggacggcaatgtgaagctgcttgcggaaccgaagaaaaagaacagaaaacatattcagatcattcacagattaccggatgaggtgctgggatgtctggagcaggaaattaccgatcttacggtaaagagggcaatcaaagcgtatgtgcgtatcttgaaagagcgtgcagaatcataatattaggaggatttatttatgtcaaaggcagatgtgattgaagtagaaggaacagtggtagagaagttgccgaacgcattctttaaagtagagcttgagaatggtcatcagattctggcaaccatcagcggaaagctgcggatgaatttcattcgtattcttccgggtgataaagtaaccattgagatgtctccgtatgacctgacaaagggcagaattatctggagagataagtaaaaaaagaattgacttctaataagtgttcatgctataatgctaaacggacacttttggatagtgcctttttgcgcatgtagtgcgccaagaagagctatgatagaacatgagagatgcacgcgggtgcgtgccattcattgtttggaaaggaggatttgctgtgaaggtaagatcatcagttaagcctatttgcgagaaatgcaaagtcatcaagagaaaaggaagcatcagaattatctgtgagaatccgaaacacaagcagagacagggctaattgttcttgtctttttgcgctttcattatgtgcggctgcagtggaacaccaggatgagttgttcgcactgttatcatatgaaacagcagggatagctgcttttttgcgtttacataccgaggacgcaggggagaaccatccggaatacgagagaattgcgagggcacacatttcaggccggaggacaacggagctgccgcagcagattcttgaacgtaaaagtcatgatgtcaagtggcttgctttaagacgcggtctgtcatctggacagtcgcaggaatcagaaaataacaagatgcgcagtgtgtatcacaggcatcatatgaatcaatggaggttaaaaagcacatggctcgtatcgcaggtgtagatttaccaagagaaaaacgtgttgagatcggtctgacttatatctacggaatcggtagaacaagttctaaccgcatccttgcagaagcaaaagtagacccgaatacccgtgtcagagatctgacagatgatgaggttaagagaatcagtgcagttatcgacgagagtcagactgtagaaggtgatttaagaagagaaatcgccatgaacatcaagagacttcaggagatcggatgctatcgtggaatccgtcacagaaaaggtcttccggttcgtggtcagaagacaaagaccaatgcaagaaccagaaagggaccgaagcgtacggttgctaacaagaagaagtaattacttttgcgatttcgttcgcaggatcgccacagatgaagtatggcggtcagttgcatacaatcattagattattttgagaaagtaggttagtttagatatggctaaagttacaaaaaaagtgacaaaaaagcgtgtaaagaaaaacgttgaacgcggacaggcacatattcagtcatctttcaacaacacgatcgtaacgatcacagatgctgaaggtaatgctttatcatgggcaagtgccggtggtcttggatttagaggttcaaggaaatctactccatatgctgcacagatggcagctgagactgctacaaaggcagctttagtacacggattaaagacagttgacgttatggttaaaggaccaggatcaggaagagaagcagcaattcgtgcgctttccgcttgcggtcttgaggttacaagcatcaaagatgtaactccggtacctcacaacggatgtcgtccaccaaaacgcagaagagtttaattaggagggagagacgaaaatggcagtaaataaagttcctgttctgaaaagatgtagatcccttggtttagagccaagctacttaggatatgataagaaatccaacagagagttaaagagagcgaacaagaaggtgtctgagtacggtcttcagttacgcgagaagcagaaagcaaagttcatctacggtgtattagagaagccgttccacaactactatgtgaaggctgatcagatgaagggcatgactggtaccaacttaatgaccatgttagagtccagattagacaacgttgtattccgtatgggattcgcaagaaccagaaaggaagcaagacagatcgtagatcacaagttcgtattagtaaacggcaagcaggtaaatattccttcttaccttgttaaggccggcgacgtaatcgagatcaaggagaagaacaagggtcttcagagaatgaaggacattgttgaggtaaccggcggaagactggttccggattggttagatgttgacgctgagaaattacagggaactgtaaaagaattaccttccagagagcagatcgacgtacctgttgacgagatgctcatcgtcgagttgtactccaagtaatcgtgattaggcggagacaatccaataggcaaattacccgagaaggagggattttgtagtgttcgattttcaaaaaccaaaaattgagatcgcagaaatttcagaagacaagaagtacggaaggtttgttgtagagccactggaaagaggctacggtacaacacttggtaattctttaagaagaatcatgctttcttcattaccgggtgcggctgtcagccaggtcaagattgatggtgtgctgcatgagttcagctcgattcctggcgtaaaggaagacgtaactgagattatcatgaacatcaagaatcttgcaatccgcaataacagttctacgaatgagccgaaagttgcatacattgaatttgagggcgaaggcgtggtcacagcagcggatatccaggtggattctgatattcagattttaaatccggatctggtaattgccaatttaaatggcggagcagattgtaagttatacatggagcttaccattactaagggcagaggctatgtcagtgcagagaagaataagactgaggatacaccgatcggtgtcatcgctgtcgattctatctatacaccggtggagcgtgtcaacctttctatcgagaatacacgtgttggtcagattaccgattacgataagctgacactggatgtatacacgaacggtaccttagagccggatgaggctgtcagccttgcggcaaaggtattgagcgagcatttaagcctgttcatcgatctgtctgaggcggcacagcaggcagacgttatgatcgagaaagaggataatgcgaaggagaaggttcttgagatgaacatcgatgaactggaactttccgttcggtcttataactgtctgaagagagccggaatcaataccgttgaggaattgacgaaccgcacaccggaagacatgatgaaagttcgtaacctgggacgtaagtctttagaggaggttcttgcaaagttaaaagagcttggacttcagctgaaccagggagaggaataaatagaatcgagcatgctcgattcattagaagtttgacaggtcaaacttcgcgctaccttctgaactgctaccgttcagaaggtaccacgttatatggcagaaacagtaagaccgaaaggcatggagtatgtcgggagccagacaggaatgaatctgtgtgatttgttccggcgcgaaatggttcgcgcggcatcgggtgagtaagaccaaaaggcatcatcggatgtaccacatcaatggaggaaaagaaaatggcaaagtatcgtaaattaagcagaacctctagccagagaaaggctttattaagaggtcaggtaacagcattattaaacaacggcaagatcgttacaaccgaggctaaggcgaaggaagttcgcaagatcgctgagggactgattgctatggcagtaagagagaaggataacttcgaagaggttactgttaaggctaaagttgcccgcaaggacaaagacggcaagagagtcaaagaagttgtagacggtaagaaagtaaccgtatacgacgaagtagagaagaccatcaagaaagataagccttcccgtcttcacgctcgtagagagatgttaaaggttctttactctgtaacagaagttccgacagatgctgccggtaagaagaagaacaccaaggaagtagatcttgttgcgaagttatttgatgagatcgctccgaagtatgcagatcgtaacggtggttacacaagaatcgtcaagatcggtcagcgtaagggtgatggcgctctggaagtactgcttgagttagtataatcagatcgattttataaaaagagaagaaaccgctcagatgatgtctgggcggttttttattttataggaaataccgtgatacattcatgtgtgaaagtggaactttcctatgaaataaaaaacgctccgcgaggatgcgcagctcgcggtaaggaaaacatcgctttgcgaaccgctcgcgcgcggagaatctcacaagcgagattcttttttatgtagaaaataggagagcacggctttctgactgtgtaatccggtgatttcatccgatatatataaggaataggatcgtaaaattacaatgaaggaaaaggagatttttctgtatggacagagacgacaacagaaaaatggatgaaggattgcagggaaatgagaagatcgaacaggcaatcagagaactccagcaggcaccgtctggtgaggaactggcgcatacacttacggtagtgcgcagacgcatgaaagaaggcgggcagtttattgtggcggtggaaccgccgcggggagatggaaaaattcagattcaggcaattcagacggcagatgggcagcaatggtgggcggcatttacaagcttcgaggaagaattaaaggggagtgggagcgtaatgtccacattcctttcggatatggaaaagttattcacagctgcattggggacagaagggataaacggtgttatcgtaaatccctggaaccgcacattgatgatggacaagaatctgatccagattgtgttgggaaatcaacattcctgactgtaagacccggcatttaggtccgatatatagagaaagacgttcagaagaacagggggaatgagttatggcgtttgggattgcatttgaaaatgggatcagatacgacggcaggacgggcggagaagcgcataagcccagaacagaccgcatggaaaaagaatttaagctggagacggcaccttacagtggaatggcggagaatggcatgatttgctataagggggttgtgtttacctgtgataccgagaataaccggatctgtctgggagatacgaccgatctgaagaaatgtatcaatattccgctggcgggaggcggaagtctgctggtcaacagagataatctggacgagctttccagggcgatcggaatgttttcgccggaggatgtcaagcgcattatgcaggcaatcgcacaggatacaaaggtacagcagatgcaaaaggaactggacgatgaaaagaacagcattggtaatttggcagccggtgaataaagtctggtgttgaagagttcaagagagaggagcgcgtggatgaatggatatgtgatagggttggtaatactgattgtgctggtgcttgcagcttctgcagcagcctctgtgatctgggatatcgactataagagacaggtatccggaaagagacagtttcgcaagctggaggatggaaaacgcatatcgcatgatctgcgcgagagacagccggaagatccggagatcatttatctgggatcgaagatcaaaccggatctggaactgcggcagaaatagaaagcgttcgtttacattcctgctttttaataaaagcaaggaactctgggagcggaagaggctttgaaaaatagaagccctggatgtagtcaatgccaagctgctccattgcagtaagctgctcctgcgtctcgattccctcggagacaataccgagcttcatgtcctgaatcatatgcatggcagcgttcatgacaaaacggcctttctggctgctaaaatatgcctgggtcattacccggtcaaatttgacgatctgaacaggcatctcgacaatatagttcagattagactgaccggttccaaaatcatccaatgagaagctgacaccgtaggaaatcagcttttccatgttggtaagcagtgtctgcttcatctccatagttgcggattcagtgatttccagattgatattggaaggatcaatctgataacgttccatgatgcggatatagcgctcggcaagtttttcatcggaacactgtgcaacagagagattgacttcgatgtaatgaagcccatattgtgcaagctgttcgttgcggatggcatggcatactttttcaaatacgatctcaccgatctgatgaatgcgaccgctctcttcggcagcgcagatagaatcatatatcggcagcagatctccgtgggcatcgtacatgcgcaccagtgcttcggcgcaggtaaaagccttctgccttgtggaatagatgggctgaaaaaatacttctatccggttttgcgatatggcatcgtcgattttctggatcagatcattttcggcatacatgtgtgctgcgacagaggaatccacgggaataaaacgctgcacagtctgtttgatttttgtcctgcggcaatagcgcagcagagaaaagaagtcttcctggcagggtgttaaaagacagtcttccagaaaaagaattttcagattgctgcccgaggaagctgacaggtaggtgtccagcgcaaatttttggatggaagcagtatcggcatgattccacatggacgcgggggtcagcattacgatctcatcatctgcggtcttaaaaatgtatgcaccgtcagtagacagcagtttttttgccagatcctgcattgtctgctgtgagtcgtcccccgaaaaccggtgatcattgatgaatacaaaggcagtataagcagacctgtcataatagatctgatgaatgaattcataaaaagcagtctggttatacataccgcttgcgcggtcaagattgatttcaggattttcaaattgcaggtaaatgatgacaacgccaaggcagctgccaaatcccacaaccaggatttcaggatttaaaaactggatgatcgctgagagtatccatacgagcatccagagtaacattcctgtgcgtctgcgcacacggatctgtctgcaatatttcaggatgagggcaaaattcagcaggatcagtccgaccgcaccaagatacgtcatgagtgcagaagaaccataagtgtatacgatgtgtgtaacaggatcacagtatatggaaatcggaagaagatagatggaaagacagatgacggaggtgataagcaggataaggtgctctgttttccggaaggctttgttggagagcagaatatccacgccgatatacataacaccgcataaagcggtcagcaccagggtgataaggtaggttttgcacacaaatgttacaaagagtgcaggcagatgggaagcagattcaattgcgacaatggaaaggatgtccatcaggatgcataacaccgtgaccgcatagaaacgcaaaaaagcgcgccgcgaatacgtctgcaacgtgtgctgctgatggtagagcagatatagaatcactaataaaacaaatccacatgcctgtacttttatattcataactccattacctcattcgtatagaaacatctatgtaagtggctttctccctgaatttatggtatcatatatggaagcggatgggaacggaaaatctgtggacttgatagaaaatgacggaggttttctcagaatattatagatcaggaggaagcagatatggacatgtccctgcttcagacaaaaatgaagcctgcaacaccgctgccagaacttcagacagtggaagatatctatagatggatcgatgaaaatattgcatatggatggcaggataaagacggaggaacgcataccagcgaaatgaaagatttccggagattgtaccggacaatgtctgtgacggaaaccctgcggcagaagatcggaacctgcattgaacaggttgcacttatgcatgaactattggatgcaatcggcattccgaaccagatgtactgctgtcggatatttgagccggatgattacggaaatctggaggaagaggagcatatgcactgctttcttttgtatttccaaaatggaaaaacatatcacatggagcatccgaatgtagaacaaaagggaatttatgagtatccgacagaagaagccgcgctccggacaattacggaatattatgtgaagctacgcggtggaaaagagagtcctaccacctgtttttccggcgtgccggcaggggtatcattccgggagttcaacgcatttatcaaccatctggcataggaacggagcaatgctcggaaacacgcgctgtggcgtcaccagaaaaaggggtatgcatataatatgcataccccttttggtaaaataatggatggtgttttacttagccgaagtatctctttaagagtccctcgaaagccttgccgtgtctggcctcatctctggccatctcatgaacggtatcgtggattgcatcgaggttggcagccttagctctctttgcaagatcagtcttgccggcagtagcgccgttctctgcatcaactctcatctgcaggttcttcttcgtgctgtccgttaccacctcgccgagaagttctgcaaactttgcagcgtgctcagcctcttcgtaagcggccttctcatagtacattccgatctccgggtatccctcgcggtgtgcaacccgtgccattgcaagatacatacctacctcagagcactcgccctcgaagtttgctctcagatcagaaaggatatcttcgctgacaccctgtgcaacgccgactacatgctcggcagcccataccttctcgccttcctgaagcttgaacttctcggccggtgccttacagaccgggcagaactccggagctgcatctccctcataaacataaccgcatactgtgcatacatactttgccataattcattctccttttcttataaaaattttaattggaatcaataatagtaactgttactgattttaaactgcaaaaaaacttttgtcaatatcttttttgcaattttctgatcaggatgagcatttttcagatgccttgcaggaagggcaggcgccgtaaaaataggtaatatgcccttcaatctcaccatcaaagtcctgaccggcaagaatgttgatatgatctaagccgctcaccgtaagatccatcacacagccgcaatgacggcagataaaatgatagtggagagcagggttgccgtcgaaacgatccggtccgattcccggggaaagcttctggatctcgccgatttccgcaagcagatttaagttgcggtagacggttccaaggctgatattcgggaactcccttcggatattcaggtatacggtctcggcggtagggtgatcataccgggttacaagaaaattcttgatagactcccgctgtttactgtacttcagcatggatgcgatacatcctttccttaaaactagtaattgttactgatatcatcttacacgcacagaaagaatttgtcaagagaaaaataggaataattattatttttagaaaagattctatttatggaatgcgtgcatatatatgaagataaggatagaagtatcagggagtacccatggcgggaatgaagcggtttgttacatatatatatgcctatgaggaggaaaaaaagggaagcaatgtcggatttgcgagaattgagatccggggacaggatgcaagaattgagattcatctgcgcggcgtctatgcggcatctgcgacatgcagagtgtatctgttccagcgcgaagcggcaggcgggaaggaagcaacaggtgtgaccggagtactggtcggtgagatgaagcttgcgaacggaagcggcgatggcgccgttgtcttaaaaggcggcagagtcggagcatctccttatggcattacagagatggagggattgttttttgtcatcggagaagagcggattctgatgagccggtggcgcgagggtgctccgtttaaggtggggctgtccggattccgggagtggcagccggatgagccgaaggagaaggcagcagagaaaggggcggcagcagaaactgcggcgcaaaaagaagtgcgggaagcagccgcggcgcaggcggaacagaacagccagacggcggcgcaagagatggcgcagagaaagcaggggggagcagcccctgtacagtcggaacagaacagccggatggcagtgaaagggatgccgcagaaggagcgcagggagacagtcgcggccgtgtcggaacagaaggaacagacgccggcgcaggatgtgccgtccggatccggaatggagacggcagcggtaggggaggagacggaggcgattcatgccaccgagcttcccatgcgcaatctgttcccggaatacgactggaatgccgtgtgggaggagctctgcagagaacacaaaccggcggctctgtttgaggagtgggatacgcagtgcatacagctggaattaaaggatctgcggagtctgccgaaaaaatactggtatctgggaaacaacagctttctgctacatggatttttcaattatcggtatctggtgcttggcaggacggcggaggaacggtggttccttggcgtgccgggagtatatcagagacaggagcgcgtgatggcggctattttcggctttccggaattctttgccgccggtccgggggatgagcgcggggaaggcagggaaccggtcaaccattttggctgctgggtgcgttacattgaagagtaaggatttaaaagggcatagcggatgtggtcctcccattttccctgaatctgggtgcaggcgtattcggtgccctcacaagtgaagccgatgacttccaaaagccggagagagggagtattttccggcatcacgcgggcaaacacccggtgcagggaaagatcggtaaaagcgatgtttaaaacctttgtcacggcttccctggcgtagccctgatgctggaatgcggcgtcgaacttgtagccgatctcgctgcagcagtacggcatgcgcagaatatcgtgcaggcagacggtaccgatgatgatccgcgggttgatttttaagaagacataaaaacggatcgatgcacatttccgtgcgagatcatactcacatttcagaatggcctgctggtgcgccggagtcagaaaataggggggacgcgtcggctcatagcgttcaaagagctcacggttgcggcactggaaagccagaacctcgttcgtgtcatcaggggtcagtatttttaagatcaggcgatcggttgtatacatggtatggacaggaagactgccggtaatatggttgttgcagttcatacatactccctctgccgaaaatgttccatcgacaaaatgcatcaaatcggctaaaataagtctatactatagtatagcatttctggagaaactgtccatgacacaggaagaaaaatatatgaaagcggcgatccgcgaggcaaaaaaggcatacgcgctcgaggaggtgccgatcggctgcgtgatcgtccagaatgacaggatcattgcgcggggttacaacagaagaaatacagagggaaatacgctggcgcacgcggagcttactgcgatcaaaaaggcgagcaaaaagaccggcgactggcggctggaagactgcacgatgtatgtcacgctagagccgtgccagatgtgtgcgggggccattgtgcagagccgcatgaaaaaggtcgtgatcggcagcatgaacccgaaggcagggtgcgccgggtcggtgctgaacctgcttcagatggcacagtttaatcatcaggtcgagatcgagaggggcgtgttggaggaggaatgttcgacgatgctctccggcttcttccgggaactgcgcgataagaaaaagagcctgcgtgaaaacgtgtagaatgcttgacaatcgggcgtcagataggatatacttaagtctccgagcagccggggtggtagcggtaccctgtaccaacaatccgctatagttggggtgaggccaaacagaggatcaggtaagctgtaaagctgcccaccataagtggcgttgacgtctgggtcttacgcaacaggaatctgtgaaccgggtcaggtcaggaatggagcagccctaagcagaagctcttgtgtgccgtgagggtgcctgggctgagctaactgtggtggtaacgtttatggttttggattcgaagcgaggcgctcggattttgcgttttataaatgttttctaaatgaattctggcagatgactttttgggagaaggagagataccatgtgggataaggcgagaaagatactttaccggggcggagagatcttagagcttctgatggcggcagctgtcgtggcggggattctggtggcgatgatcacgcttgtgcctgagctggcgcgctactgggaacaccggacgacggcgggggcatttctggagtatctggatgccgtgtttaatgttgtcatcggcattgagttcttgaagatgctatgcaaaccaagttccgcgaatattattgaggtgctgatctttttgattgcccgtcatatgatcgtgcagacgacgacaccacttgaggatctgctctcggtggtcagcatcggtatcctgttcttcttccggcgttttatgctgatgaccaaaccggacaaggaccagcatgtcccgaagctttttggcgtgataaaggcgtcacagagcagcgggacagcacaggcggagcacgtggatgcagagaaaaatgcagaaggaagcaaaggcgctggggaaaaatagcacattgattgacagatgcatgacggtgttgtatgctgggagttagagatgactaacaaaaagcacaacccgtcatgcatttattttcgtacaagcattgctttttgtaaaaagcgctatataataaaagcataacggtggcgcagcccgcatgaatacgggaagtaagcgcttacattaaacacattgtcaaaggagagagtatactatgttcggatttggtcagttgatcgatatcttgaagaaagatccaaagaaaattgtttttacagagggaaatgacccgcgtattttagaggcagcatccagattactggcaggtaccttcctgcacccgattctggttggtaacccggatgagatttttaaggctgctgaggagagcggattcaatattcgtggcgctgagatcattgatccggcaaactatgacagatttgacgagatggtagatctgttctgtgaactcagaaagagcaaaggtgtgacaccggagcaggcaaagggcattctgtcccaggcaaactacttcggaaccatgcttgtaaagatgggcgttgctgatgcacttcttggcggagcaacctactctaccgcagatacggtacgtcctgcattacagctgattaagacaaagccgggcaactccatcgtatcttcctgcttcattctggttcgtccgtctgcaaccggtgagaacgaggttcttgcaatgggtgactgtgccatcaacattcatccgactgaggatgagttggttgagatcgcaggcgagtctgcagagtgtgcgaagatcttcggtgtagatccgaaggttgcattcttaagctactctaccttaggctccggcaagggtgaggatgtagacaagatgcgcaatgcagcagcaaaggcaaaggcaaaatatccgtctcttccgatcgagggcgagttacaatttgatgcagcagtatccccgcgtgttgcacgtaccaagtgcccgggcaacgaagtggcaggacatgcaaacacctttattttcccggacatcaacgccggaaatatcggttacaagattgcacagcgtcttggtaatttcgaggcatatggtccgatcctgcttggcttaaatgcgccgatcaacgatctgtcccgcggatgcaacgcttccgaggtatattccatggcaatcatcacggctgcactggcataatccggacactgcacagaacaatagaatgacagtcatttgtggcatggcgtgacgctgtgccacatttttttgagggaaaaatggaagcattactttttaccagagaagatttgaaaaaactgattgtaccgctcattatcgagcaggcacttgctttgagcatcgggctgtttgacacgctgatggtctcctcgtgcggcgaggcggcggtgtcgggcgtgtcgctggtggacagcatcagcgttctgctgatccagattttgtcagcgcttgcaaccggtggtgccgtggtgtgcagccagtatatcggcaagaagatgccggagagggcaaagctatctgccggacagctgatgtttatcatgcttgtgtccgcagggacggtgatggtggtcatcctgctgtcttaccggtttctgctccgggcaattttcggacagattgatgcggacgtcatgcagaatgcggagatttattttatcatctcggccatatcctatccgtttctgggcgtctacaacgcgggagcggcgttgttccgggcaatcggaaacagcagggtcagcatgtatacaagccttgtcatgaacgtgatcaatatcggcggaaatgcagtgctcatttttggatttggtctgggcgtgatgggcgcagcgcttgcaacgctcacggcgcggattgtatcggcgctggtcatggttgtgctgctctcaaggaaggacaacccgctgtgcattgcgacaccgggctgtatgaagccgcagagggatgtgatcggaaaaattttaaagatcggtattccgagcggtgtggaaaacggaatgttccagattggaaagcttctggtgtcgcgcctgaccgcgacgtttggcacggcggcgatcgcggcgaatgcggttgcgaacagcgtggcaggatttgccaatattccgggtattgcgatcggacttgcgatcgtgacggtcatcggcagatgtatcggagccggggaaaaagaacaggcgagatactacagtaagcggctgctcggtctggcttatgcgggaatggtgctggcagatctggcgttgtttgtactggtaaaaccgatcattgcctgcttcgcgttatcggcagaagcggcgcggattgccacacagcttttggtaagcttcgcggtctgcgcggcgctgatctggccgctcagctttacactaccgaatgtgctgcgcgccgcaggggatgcaaagtacacgatggaggtcagcgttttttccatgtgggtcttccgtgtggcaagcagttacttttttgccggaacgatgggacttggcgtgctcggcgtatggatcggcatgtatgtggactgggcgttccgcacgctgcttttcgtgatccgctaccggcgcgggaagtggctggaaaagcgcgtggtatgatgccgcaagggaatggattcctaatattttcttattttttgataatacagtttcatttttgcgggaaatacggtagaatatcagagaaatacgttcagatgatgaggattttgaagaaatgtacaagaatatgggaaaagtaaaacgtacgctggaggaatatgtgattctgacggttgccacgctgattctggtggtgggtgtttatgtgttcaagttcccgaataatttttcgtttggcggagtcacgggtatcgcggtggtcctaagtgccgttatgccggcaactccgggaaatatcacatttatcatcaatatggcgctgctggtggtaggatttattttcctcgggaaaagctttggcatccgcaccgtgtatgtaagcgtgttgatgtctgtggggctaagccttgcggaagtgtggtttccgatggagcatccgctgacgacgcagccggtactggaactgatgtatgcgattgtgctgccggcattcagtgcggcgatcatgttcaatatcggagcatccggaggcggtacggatattatcgccatgatccttaaaaagtatacgaagctgaacatcggaggcgcgctgtttctggtggatctggggattgtcatagcttcgtgttttgtgtttgatgcacagacgggactttgttcgctctgcggacttctggcaaagtcgctcgttgtggacaatgtcattgagagtatcaacctgtgcaagtattttacgatcatctgcaatgatccggagccaatctgtgattttatcacgaatgagctgcaccgcagtgcaacgatctataaagccgagggggcatatgagcacaaccagaagacgatcattatcaccattatgaagcgctcccaggcggtagaactgcgtaattacatccgcatccaccagccgaccgcatttattgccatcacgaacagcagtgagattatcggcaaggggttccgcggatttaattgatagtaaaaggagaaaggtttttatgaaaatttgggaagacgaaaggcagtgctatatccgtgctgccatggagaagaattcagaggcggagaacgaggcgctgaaggcacagctggatgcgatcgactggtctgtgttagagcagattgagcgcaaggagaccgtgaacgagcggggcgtattcgcaccgcttgaggcggttgagatggaagaaattgagcggcgcagggacgagttccgggaactcggcatcaaggcgatccgggaaggaaaagtcggagcggttcttctggcggggggacagggaacgcgtctcggactggacagaccgaagggaacactcaatatcgggattcaccgggagctgtttttgtttcagcagctcattcgtaacctgatggacgtgacggatgaagccggcgcatatgttccgctttatatcatgacaagcaacatcaaccatgacgacacgcaggcattttttgaggagcacgggtactttggctacccgaaggagtatgtgaagtttttcgtgcaggagatggaacccgcctgtgatcatcaggggcgcgtatatatggagtcccgtaccagggttgccatgtccccgaacggcaatggtggctggtttggttccatggtgaatgcagggctgctttccgacatccgttcccacgggattgagtggatcaatgtatttgctgtggacaactgcctgcagagaatcgcagacccgctgttcatcggtgcaacgattgcctacggctgtgagagcggcgcgaaggttgtcagaaaggcagcgccggatgagaaagtgggggtgctctgtaccgaggacggcaagccatcgatcgcggagtattatgagatgacacaggagatggcgaccgcgcggaaggcaaatggtgacctgctctatggatttggtgtgatcttaaactacgtcttttccgagaagcgtctggaggagatcgcggatgcacatatgccgatccatgtggtagagaagaagattccgtatatggacgaatccggcagcatggtgaagccggatgcaccgaacggatacaagtttgagacacttgtcctcgatatggtacacatgatggcggactgcgttccttacgaggtcgacagaaagcgggagtttgcgccgatcaagaatctgcacggcgtggattcgctcgacagcgcccgcgagcttatgcagggctgcggcatcgaattgtaacataaaacggacgggcttcccggcgggaagtccgtccgtttttggcgctgcagaagatttaataaatattttatggggatttaacggcgggttcatgaatgtctgctataataccagatgatggaaaacagacaatggaggtttttataaattggaggaacaggggaagcagcaggaaatagaaatcgaagaggtgaccgcacaggagaatgtgatcgcggtgcgggatctggtgccgatgcgtgcggcgatggatgacagcatggaacggatcgcagatatgaaggatcagttttcacagacgatcgatccgatcctgcgcatgtacaatgcggcgatgtgtgcaacgacggcaaggcttgagataatagaggacgagttcaagtaccggaagctgcgctgtccgatccaccatattgacacccgcctgaagtcggcgaagagtattctgggcaagctccagaagaaggatctggatctgacgctgtcggctgcctgcaacaacatctacgacatcgcgggaatccgtgttgtctgctcttatatcaaggacgtctatctgatccgcgaccgtctgatggcgcaggatgatgttatgattatgcagatcaaggattacatagagacgccgaaggagaacggttaccggagtcttcacatggtcatccgggtgccggtatattttatgaacaaaaagcagctggtgccggtggaactgcagatccgcacgctggcgatggatctgtgggcaagcctggagcatgacatcaaatataagtgtctgtatcagacggagacggagaatttctccgaggaactaaaggaatgcagccggctcatttacgaggcggaggagaaaatggagatcatgaaccgtacactggaagcataaggggaggcgcgggcgatgagagagaaacagaatccggtcgaaaaagaatgggcagcagttgtcaaggcagaggagcgctttctgcgccatgccatgccggcgcggacggcgggctggcaggagaagatcacgcgctatgtgccacagaagctggaggcgactctgcacaccgctttttacaaagcgtttgaactgatctttgacaagggaacgccggtgatagagaagacctatcagagggagaaaaaggagcagaattataagatcaatgcttacgccgcagaggtgcgcgacacgagacatgccctgcgggcattcgggagagaggcgggtgccagccggaacctgaatctggcggtatcggcggtggaaggtgtcggcatgggatttttcggtctgggtctgccggatataccgctgttcctcggtgttttgttgaaaagtatctacgaggtcgcactcagctacggatacacgtatgacacgcaggaggagcagatcttcatattaaagctgatcgagacggcattgtcgcacggcgagcagcttgcccagaacaatatggagctgaatctgtggatgcgtgaggagcgtacgttttccgtttccagaaacgagcagatccggcgcacatcggatgcactggcgggagaactgctgtatctgaaattcgtgcagggactgccggtagtcggtatggtcggtggagtttccgatatggtttatcagaagcgcatcagcgattatgcagcagttaaatataaaagacgttttcttgagacaaagaggaagaccggggaagaaaagagacatccggcaggataagtttgcggatggcatgcagaaggggaagccgttattcggcttccccttctgcgacaatatcctcaagaacatgaatcaggtcatacatgttgttgagacagacattccgttccagaatcagatttttcagatcagcagacagggtatcaaaccggtcgcggatctcgggagatacataagatgccataagattacctcactttttcatacttcagaaaaagtatgagcatccggagagctttttatgtgtaaaaaatgccgtaaaggtggtatgatagtggagaaaaagtggaatggaataagagtatgaatgagaaaatttactgccggatcaggcgtgtgcgcgcggtatttctgacatttttcctgacggcagcagttgttttgacagacgcacagaacatccgggaaaaggaatacgaaaaaacagagatcatatactgtattggggacagtatcacatacggcagcggtctggaggatgaggaacggctgacgaagtcgtatccggcgcagctaggaatccggcttggcccgcgctacctcattttcaattacggcgtgagaggagcaaccctgcaggatctttcccggaaaagctaccgcaacatggggtatctgaacgtgatagaggcgcagtccccggatgtggtgattattatgctgggaaccaacgattccaaacagaaatactgggatgcagagaggtatgaggaacagtatcttgcattgattgacgaacttcacaatctgccgggacatccgtatctgtatctgatggcaccgccggaagcatttcctgcggaggagggagagatcctatacgggattaacaatgatgtgatcggaggagagatccggaaccttgtgccggacatcgcggagcaatcgggctgcggaacgctggatctctacgcgctgacgcaggatcacccggaatatttcgtggatggaattcacccgaccgaggaaggatatgcgctgattgcgcagatggttgcggatcagatccgggcagaccggaatgcgggcgtgtggtgacgcggttaaaaaagggcttcaaaaattacaaaaaatatgatataatgaatccattcatctgaaacggagtatggcgtagtttggtagcgcgcacggctgggggccgtgaggtcgcaggttcaaatcctgttactccgattccttggcaggggcacggcaggcgaagcgatccgtctggcggcttaagaaagagagagaccgtatattgcggtgtctcttttttatgtaataggaaacttcgttcctaattacacaaaaacgttccgcggggatgtgcagctcgcggtgaggtacataatgctttgcataccgctcgggcgcaagtgtgcggcaagcgcacactttgtttttaggaaaaaagaaagacatagaaaaacccggcagaatcaatttatgattctaccgggttttgtgacagcggagacggcgggattcgaacccgcgtgccccggagggctaacgcatttcgagtgcgccccgttatgaccgcttcgatacgtctccgaatgaatggatcacagaggattctactgtgagacactcgattagtatatcatatctggttgattttgcaagatgctttcgcgaaaagtcttgaaataagttttttcgggagatactatttttatagcataacaggagggtaaggtatggaaaataagacacgggaagcaatccggtttgagggaagcgtgcagggcgttggattccgctaccggatgtcacagcttgcaagacactacgatgtgacgggatgggtcagaaatgagtacgatggaagcgtctcggcagaactgcaggggagacgggaggcgatcgacgagatcattgcgcgccttagggaggattcctatatttatctggacagagtgagccggcagaaactcgaattaaacgaagaggagcgggcattttccgtgcgctattaggcgctacggcgcgctggtgctgtgaaacacagttgcaaaatggcgtcgaagagggtaatattctatatagaaaaactgcggtccggatgcggacccacagaccatgaactgatggtacgaaaagacggaaacaggaggagaagcagatgaagagaatcggtatgttgacgagtggcggagactgccaggcattgaatgctgccatgcgcggtgttgttaaaggactcagcgagaacgtggatgaattggaagtatatggttttttgaatggctataaaggtctgatttacggggactaccggctgctgacatccgcggatttctccggtattctgacgaaaggcggcacgattctcggatcatcgcgacagccgtttaagcagatgcgtgtgccggatgcaaacggactggataaggtggaggcgatgaaggcgacctaccacaagctcaacctggactgtctggtgatcctcggaggaaacggaacacagaagacggcgaacctgcttcgggaagaggggttaaatattatccatctgccgaagacgatcgacaacgatatttacgggacggacgtcacattcggatttcagagtgccatcaatatcgccacagattgcattgactgtatccacacgacggcagcgtcccacaaccgcgtctttattgttgaggtcatggggcataaagtcggctggctgacgctttatgctggcgttgcggggggcgcggatattattctgcttccggaaataccgtacgacatcgagaaagtgattgccgcgatcaacaagcgcacgaaggcaggaaaaggatttaccatacttgcggttgccgagggagccatctccaaggaggatgcggcgctctccaagaaagagtacaaggaaaaagtggcaaagcggaaatatccgtctgtttcctacgagattgcagaccgtatattcaaggagaccggcgtcgaggtgcgcgtgactgtaccgggtcacacacagcgcggcggaagcccatgtccgtatgaccgtgtgctctgcacgagactcggttcggcggcggcaaaagcgatcatggacgagaactacggcaacatggttgccatggtcaatggcaagatcaaatatgtaccgcttggagacgtggcgggcaaattaaaaacggtcgatccgaacgaccagatgataaaagaagcaaagcggattggaatcagctttggagattaaggtgagggaaaagcatgtcatatcaggcattatatcgtaagttccgtccgcaggagtttgacgatgtaaaaggacaggatcatattgtaacaacgttaaagaatcagattaaagcagacagaatcggacatgcttatctattttgcggaaccagaggaacgggaaagacgacgattgccaagatttttgcgaaggcggtcaactgtgagcatccggtggacgggagtccgtgcggggaatgtccgacatgcagggcgattgcggcgggcaattccatgaacgtgattgagatcgatgcggcttccaacaacggcgtcgacaacatccgccagatccgcgaggaggtggagtaccgtccgaccgaaggaaaatacaaagtctacattatcgatgaggtgcatatgctttccataggagcgttcaatgcactgcttaagaccctggaggaaccgccggcgtatgtcatttttattctggcgaccaccgaggcgcacaagattccgatcacgattctatcacggtgccagcgctatgatttccgcagaatctcgatcgacacgatcactgcccgcctgcgggaactgatggatgcggagcaggtgacggtggaggacagggcgctgcgctatatcgccaaggcgggagacggctcgatgcgtgacgcgttaagccttctggatcagtgtatcgctttttacctgggacaggagctcacttacgacaaagtgctggatacgctcggagcagtcgacacagagattttcagccgcctgctgcggcagatcctcgataaaaatatcacgggggcaatccagaccgtggagacgctcgtgatcgaaggacgggagttagggcagtttgtcacggatttcacatggtatctgcgcaatctgatgctggtgcaaagctcggacgatatggaggatgtgcttgacatctcttcggaaaatctggcgctcctgaaagaagaggcgtctatggtggacgccgatattctgatgcgctatatccgcattttctcggagcttggcagccagatcaaatatgccagccagaagcggattctgattgaaattgcagtaattaagttatgtaaacctgaaatggaaaaagattacacgtccctggtggaccgcatcgacagcctggagaagaaactggaaaaaggcgttgtgatggcggcaccggggagtgccaggcagggcgtaggtggaagcgcgcagggggcacagggaggctcgctgcccaaggcagaactgcccaaggcgattccggaggatgtgaagcaggtgctgacaaactggggcggcatcttatcgcagcttaccggcgtgacaaagacgtatcttaagatggcgacccggtcgctcggaccgaacggggaattgatgctggtgttcgatgacaaaaacgcttatgagtacgtcgagcagaaccgttcggattgccaggacgcattaaaagcggcagcggcggaccggatcggcaaagaggttgcgattctggtgaagttaaacgatacggggcatgccagtgacgaggtctatccggatctgggcgcgctcattcagatggacatcgaggaagaggatttttaaagctggacgaatcacacaatttatattatgatagatggaacagtcctaagagaaaagcaggaggaagcagacatggcaaaaagaggtggattcccgggcggtatgccgggtaatatgaataaccttatgaagcaggcgcagaaaatgcagcgccagatggaagaggctcagaaggagttagaagagaaggaagtgactgcggcagcgggcggcggagctgtggaagtgacggtatccggcaagcatgagataacgaaagtaaagctttccccggaggttgtggatccggatgacatcgagatgctggaggatctgattatggcggcggcaaacgaggcctaccgtcagttagacgagttttcccagagttccatggcaaagattaccggcggcatgggcggacttggcggaatgccattctaatagaatttataactgcacctgtgtggcgatcgcgctgtacgggtgcagttttgttttatggcactgcagctttagcgggtaaataccgtctgctgataagcaaggcgatgagaagatcacgacttttgctttcaggcagaatgcatatggaaattctgttcaaaaaatgtggcatttctgcctgaaatcagtatgacgtgcttcttaacattgcttatcagcagacggcaatgtctatctgatacggcagtgccatgaaacaagagcaacctgcgtgggggcacatggtgctcagagctttgccttgaatacctcgtcggcgggatagccgccggcgcacttctgcatgccgcgctggatgctgtcggcggaggtaccccagtccttgtccttgttgcggtagtcgtttttttccacaaaccaggacacttccttctggagccggtcgagattctcctgcatcaacgaaaaagctttgggataaaactcttttttctcgtcatcggtcagtttgtcctcggctgtctcgatcagatcaccaaagtgcggcaggcagaatcctctgcttttttcaaaaagtgcgcggaattcctcatttttcttatacaggtcgaaaaaagtatccagataacggccgtagatctgatggaaatggtcgcagacatagcagtcggtggtcttagcggcgatccatgcgccgagaggcgttttgggcgcattcccggatgagacatccgtgtgcttcatgcgtttgataaagctggatttgccgggcgtaaaatgtgccagctcatcgccgagctcctggttcagcttttttaagtgtgtgcttaagatcagggcgttgccgagccggttgccgtagtcgtacatcatcttgaagtggtggcggcagaaaccggtggcgtctgttttggcacggatatcatcttccatataggcagagccgaggatgaaggagatggcatgctgctcggcctcgcgttccaggtagcagaaaggacattcgtcgtctgcgtggaaggcattcatcaaagggatggttgcaatcgtttctttcatggtaatctccgtttcttttcatacaatctgtgaataaatccagtatagcataccagaggaagaaaaatcaaaaccgccttgtaaaatgcggcgttatcaagtaatatatataaggctgcagggaaagcctggcagtgttgacaggaagtttgagggagagaatggaatactatagcagacagatcagcaagttaatacaggaattatccgccctgccgggaatcggcacgaagtctgcacagcgtctggcatttcacattctgaatatgccaaaggagcaggtggaggagctttcttctgcgattttggacgcaaagcagaatgtgcggtattgcaaggaatgttttacgctgacagatgaggaaatctgtccgatctgcagcgacagttccaggaaccataaggtcattatggtggtggagaacacgagggatctcgcggcatacgagaagacacagaagtatgacggggtatatcatgtgctgcacggcgcgatctcacccatgctcggaatcgggccgggggacatcaaactcaaagaactgatgcagcgcctgcaaaaggatgtggatgaggtcatcattgcgacgaattccagcctggagggggagacgacggcaatgtatatcagcaaactgatcaaaccgaccggtataaaagttacgcggattgcgagcggtgtgccggtgggcggcgatctggaatatattgatgaggtgacgcttctgcgcgcgcttgaggggcgcacggaactgtagtgaccgcatgagaaaaggatgcaactgtccggcatctggggcgggcggatgacaatcagatataagaaaggaccatgacacgacatgacgaatctggaacttcaaaagacagcaaatgaaattcgcaaaagcattgtaacagcggtgcacagtgcaaaagcgggacacccgggcggatcgctctcggcggcagatattttcacatatctgtactttgaggagctgaacattgatccgaagaatccgaagatggcggatcgtgaccggtttgtgttgtccaaaggacacacggcacccggactttacgctgcgcttgcagagcgtggatttttccctaaggaggatctggtgacgctgcgccacacaggatcctatctgcagggacatccggatatgaagcatattccgggcgtggatatgtcgagcggttctctgggacaggggctctcggtggcagtgggaatggctgcggcaggaaagtttgataagaaagattaccgtgtatatgcactttgcggtgacggagagatccaggagggacagatctgggaggctgccatgtgggcaggctttaagaagctggataatctggtggtgatcgtggataacaataaccttcagattgacggttccatcgatacagtatgttccccgtacccgatcgacaaaaagttcgaggcgttcaatttccatacgatcaacatcaacggaaatgattttgacgagatccgtgcggcttttgcggaggcgcgggcgaccaagggaatgccgacggcgattatcgcaaagacattaaagggaaaaggtgtttcattcatggagaatgccgttgactggcacggaaaagcaccgaatgatgatgaatataagatcgcaatggaagatctggaaaaggcaggtgcagcattatgtcagaattaggaaagaagattgcaaccagagagagttacggcaacgcactggtagagcttggaaaagagcatgaagatctgatcgtgctggacgcggatctggcaggtgcgacaaagaccggcatttttaagaaggcatttccggagcgccactgggacatcggtattgcagaggcgaatatgacaggaatcgcggcaggtcttgcaacctgcggaaaagttccgtttatcagttcttttgcaatgtttgcggcgggcagaaattacgagcaggtgcgcaactcgatcggttacccgcacctcaatgtgaagatcggagcgacccatgcgggaatctccgtgggtgaggacggagcaacccatcagtgcctggaggatctggctttgatgcgcgcgatcccgggaatggtcgtgctcaatcctgcggacgatgtggaggcgcgcgcggcagtgcatgcggcgtacgatcacgtgggaccggtgtacctgcgttttggacgactggcggttccggtatttaatgacgaggcgacctaccggtttgagattggcaagggaattgtgttaaaagagggaaaagatgtctcggtatttgcaacaggattgtgtgtgaacgaggcgagagaggcggagaagcttctggcagcagacggtattgacgcggagattatcaacatccatacgatcaagccgctggatgaaaagctggtgctggcgtctgcagcaaagaccggaaaagtggtaacgatcgaggagcattccgtgatcggcggactgggaagcgccgtatgcgacatcctttccgagaagcagccgacgaaagtcatgaagatcggtatcaacgatgtgttcggagagtccggtccggcgctggaactgattcaaaagtatggactggatgcccagagcatctacgagaaagtaaaggcgtttgtaaaacagaattagagaaaaatgcagataaggccgcggggattgtagcttccccgcggcttttgtgattccgggaaacgttttgccagaagagacggaaagctgtcgaaacattttttcggacaagcccataatatttcaaaatatgcagagggcttgtggtacgatttccccgagaaaaggctgtaaaatccatgtgcgcgtattgcgcggatacgcagctggatgcggaaaggggaatcgtgtggcatgatagagattattcaccaggaacagacggaagaaaaggtacagagggaactgccaagagaaatcaaacagatcgggtcgccggatgcaggggaacggatttatgtggaagataccgtgtaccgcagaatgcatccgcatggcggtgtggaagaaaaaacggcatatgtgctgctgggaaaatttgagaactgcatgggcagagagtgcacgtttgtggaagcggttattccgttgaatgaaatcctgtttgaccgggacattccggtctgggacgatcacacgtgggcatacatatataagcagttaaagccggagcatgatccgttcgtgattgtgggatgggcgctggatatcaagggacagcttcccaatatgacagcgcatctggaggcgctgcatcaacggaatttcggtggaaagcgccagattctttttctgatggacagcctggaatgtgaggaggcggtctacggcagccggaacgggcacctgtacagaagagatggattttacatttattaccagcacaggcaggtgccagaggagaacgacctctggaaaaaagaggaaaaagaattttaccgggaaatggatgtggaaggggaagagaagccaaaaccggcagtgccagtaagcgccggggagcgggaagcaccggcagacatggaaaaaacgtcggacgataatgaaagtgcaggaatataccgagatctttaccgcaggaggatacaacaggaagccgggcggcaggaggcccgggaaagacccgcgtatgcagctacagttttgctgggggcggttgtgtgcgtgcttggtgtgaccgcatatctgaatcatgaaaagatggcggagatggaacagacgctcgcacagatgaagggaacccggtatgtgacagaagcgcagacggcggacgcggagacggaagagacggagcggatgccgtctgtggcggtagagacggtgatggggaatgtcgaaaaacaggaactgtctgcggaagcggcaggaatgcaggaagatgttacagcacagcaggcggagacggcgcagggagcacaggggacggcagagtcagcggaaaatgtgacggcaaatgcagcagcaggaactgcagcgggatcggaaactgcgggggatacggcggcagccggtggacaggcatgcgcagacgcagcgggcacgtcggtggaggcgcagacgcagggcacggcatccacggacgggagcctggcggcacagacccagggcacgacgacagctgccgggaatgcatccgtggagaatacacaggaggcggcagcacagaccgcggcgcagatgtatctgtcacagggatattacgatgtgcagaagggagacagccttgtgggaatctgccggaaaatataccagacgacggcaatgctggacaagctctgtgaggtcaacggcattgaggatgaaaatgccatctacgccggtcagcgtctgattctgccgaattaaaaaaatagtgaaacgggaatacacacatgctataatgtccataagcagttgaaggataggcagcatagaaacgaggaagtatggcagaaaaaaacaaaagcggatttcatacggtaggggataccgatatggaggaatataaccgtaaaataaaggaacatcgcagaaaggttctgcgccgcaccgtgattgtgacggcggtcattcttctggtgctgaccggactgggactttacatggcgctccgccattatgaaaactatgacattatgtcaaccgcggagcggtcggatacggatgcgacacattttacggaatttcagggaaatattttaaaatacagcaatgacggggcattttatctggatgccgcgaatgaactgatctggaaccagacgtatgagatgtcgtcgccgaagctggatacctgcggaaattatctgagcatctacgacaagggcgggacaaaaatttatatcttaacaccgacaaagcttgtgggaagcattgagacaaccatgcagattcagcaggtatgcgtggcggagcaggggacggttgcggttctgatgaaaaaagacaaggcggcgtaccttgcgctgtatgacagagagggcaacagcctggcggaaggggagatccacggccagaacgggggatacccgatcgccattgcgctttccaatgatgcggtaaagctggcggtatccatgatcaatatcaatgaaggaagcgtcaagagcacaatcgcgttttataattatggcacggttggccagaacgaaatcgatcactgtgtgggtgtgaataattacgatgatatggtcattccagagatggagtttacctccaacgaccggatggttgcgttcggcgatacgaaagcagtgatctttgagggcgcgcagaagccgcaggcaatcgcggagatcccgatggatgagaagacaaaaagtattttttacaatgagcactatatcggaatcgtgaccggcaatgaggatgaggcggtgaccaatcatctggcggtgtatgatgaaaacggaaagctggtcatggaaaaggatttcggtctggactacagcagtatcgaatttttgaccaataatgagatctgtatccggaacgcaaatgtctgcgacatctatacggtgcatggtgtttataagtttcaccatgagtttgaagaagaactttttgagattataccgggaaaattaaaattgaactacacgcttgtgctcaaagatacgacacagcggatcagattaaaataaggaggagattatgaactgggtattgatgcttgtcctcctggtgttggtgtgctgtgcaatctacggctacacaaagggatttttaaggattgttttttcacttgtcgcatgggtgattgtgctggtgtttgtctcgtgggcaacgccgcatgtcagccagtggatacaggagaatacaaccatttacgaaaaaatagaagctgcgtgtgaggaatctgtgcggcgtgcggcgcagggaaagatggaagaaggcgcagtggaacagtacggagaagccggggaactggggctggatcttccggaatctgtgatggcgcagatcgtttcgggggcttccggcgtagcggacactgtgcttgcggagaccggagtatatgcagggatcgcgcagagcctggcaggatttatcgtgcagggaattgcgtttgtgacggtgctgattctctcgtggattctggtgcacgtgatctcggcgctgcttggaatcgtatcgcatattccgatattaaaaggtgtgaaccgctttacgggaatgttagcggggctgatgcagggacttcttattgtgtggattgcgttttacatagttgccctttgcagtgcgggagagacagggagagtgattgtttcctatataaatcagagcgcatttctgaaagaactgtatgaaaataatattcttctgtctctgggaacgggttttgcacgctaaaaggcatgaattacaagggctgccgacagtgaggggaaaatccgtgaaaactttttaaaaaaactgtaaaaagagtgttgacaatctgagatgcagatggtagtatatacaagctgaccgcgagaacagcggacaggcaaagcgcttctgaaaaagaagcaaaagaaaataaaaaaagttgttgacaaacggttgacggtatgatatagtaaataagctgtcgccgagagatgacaacgatgaatgagattgaaaaatccgttcgggagttgcggagcaacttctaaagtcaatacgaagtattgacgatgtacattgataactgaacagtgaataaaccttgaaagatcctaaatttcaagctgtcgatcaagagattgaaagacggacgaacgttcttataaagaacaacctaaaacagtaaattcagagtaacatctgaataagccagatgattctggaaaaggaaacaaactataacatgagagtttgatcctggctcaggatgaacgctggcggcgtgcttaacacatgcgattcagtcctgtgctttcacgcaactttataattctgtttttacaatccatccgtcttttctccacaaaagcaaaaaatacacgttgcgtaatcattatagcatagccatagcgaatacgcaacgtgtaaattgcaaattttacgcagccttatccgtcagaagctgcgcttgcttatcatccttggaacactccaccgtttgtggagtatcctgctctaatttatccaaaacctgatgcccgtacttctggagcatctggctcataacatccacacagcggtcaaatgccgcattatatttcgcttcctcataatatttcttcaataggcaattcctccatcaaagttccatatcctgtccacgcttctgggcagggtgtttgtgttcctgcgtttcctttcctctgatgaggatagaattgataaaagcccgaaccctttcggatgcaatttccagtgcatccagaaaaggctgggctttctgtttcagttccatatatttttcgcttactgcttcataccgctgtttccagatggaaaccgtcttttcagcggaagccagtttctccttcaagcgcttgttgtcagcattggcgataatgccgttgaccgcatagcgtttgagcgtgtcgcattcatccggtgtcagcgtgatattatttccgaatgtggctttctttcccatcgtttcaatctcctgcaccgtcagagcaacggtctttgctgttttggtttccttttgcagagcttccagtttctttttctgtttctccgtggcagctttggcattctccaacccccgcttcgcctgtgccacctgcccggtcacagcttccaagcgctgctgttctgcctgcaccttgaactgggtcacagtcagatgttcctctgtactgccacgctctccacgctccacatcggtatatccggcatttcgcatgaaatgaaaaaagtcatcctgcaacacactgtaggacgacttcaaaatcttttttccttttgcgttcaacattggattaccatccttgtcaagcaccggcttggactcccattttttactgcggctgacctgcgtgatcgtttcctttaccgttccccggagggattcatccttacatcgcttcgaccacagaatttgcttctctaccaccgggatataaaccacatgaaggtggtagtggtacacatcttcgcccagagcttcggacattgcccggttgcgctcgtcggcgtgcatcacagcggataggatatactgctcaccgcctacgatctccacggcggctttataggcatcggcataaaactgttttgcaaattcatagccgccgtgattgtagaagtaagcagagttcacatcaaagatcaactcaccgtatttgacggcatccggtttcagacctctggtggagatcacgccatcctgttccatctgctcgaacatttttacataatcgtcagtgggagacttgaagtgaacattcagcgcagtacgttccggcacgacgtcctgattgctgtagctgtccttttcacgctcattgtgttcctgtaccttcgccacatcagccggtgtttccaagtcctacaaaggcttgaaaatcttttatcagaagttttgtatgaggattccgattcggtatagaacgacaaccggagttatgatacaatgagcacgagcaagtcaggctgtttacagatttgacgagcggcgaattggcttatggacttgtccataagatgcctacacgcaagaagcatttcatcagttccgattgtctgatatcgaaaggagacacacgattatggcaaaaggatctgtaagaaaaaaaggaaagaaatggtactaccgcttctatgtagaagatgcaagcggcaatctggttcagaaagaatacgctggaacagaaagcaaaagtgaaacggaaaaactgctccgtcaggcaatggacgattacgaaagcaagaaattcattgcaaagtcggaaaatattacagttggagaattacttgatatatgggcagaggaagaattaaagaccggtactctcagtaatgggacagtccagaattaccttggtgctattaccaacatcaagaagcatccaatttcagagagaaagttgaaaaatgtaacatctgagcatttacaagccttcttcgatctgctttcctttggtggcacttatccagatggttcagaaagaaaaggttacagcaaagattacattcgttctttctcggcagtattacagcagtcattccggtttgcagtatcaccaaagcaatatatcactttcaatccgatgcagtatattaagctgaaataccagacggatgaggttgacctgttttctgatgatgacatggatggcggtatacagccaattccacgagaggattatgaaagactgattgaatttctacaggattacaatccaccggcaatacttccaatccagatagcttattatgcaggacttcgtatcggtgaagcctgtggtctggcatggcaggatgtaaatcttgaagaacagtgccttacgatcagacgcagtatccgatatgatggttcaaggcacaagaatatcatcggaccaaccaaacgaaaaaaggtaaggattgttgattttggagatacactggcagagattcttcgcaatgcccgaaaggaacaacttaaaaaccgaatgcagtacggagaactttaccacaaaaactactacagagaagtaaaagacaaaaacagagtttactatgagttctatcatctggacggaacagagaatgttccagaagattataaggaaatatcctttgtctgcttaagaccggatggaagtttggaactgccaagcacgttaggaattgtttgcaggaagattgctcagaaactggatggatttgaaggatttcattttcaccagttgcgacacacctacacaagcaaccttctggcaaatggagcagctccgaaagatgtacaggaactgttaggacactcagatgtcagtaccacaatgaatgtctacgcccattccacaagaaaagccaagcgggaatccgcaaagttacttgataaagtggcaggcaacgactaaataaaactttcccttatttcccttacgattatctcataagggcaaaaataagggaaaatacatatcatttcactaatgaatgggctgaaaagcctgtaaaatagggaaagttagaaagatatttcagcaaacttgaatttattttaagctatcacgttttaccttcttaagccttactatcattaccataggaatttctttgttggttttaaaacattcttcataaaatccatcaatgacaaatccagctctaaaacaaaggttaaaaatatcttgtatggaacgatgataataaatctgctctttcggttgcccttcaatcgctatatcatagtaactgtgcggtgtcatatatttttcagtcaacgtgacaaaacaagggtgttgcgttgcaaagacaaaaattccgctttcctgcaacagttcataaacagccataagaagtggttcaatatccgtaatatccataattgccatattagaaactgctttcgtaaaggctcgatttctttttaattctaatatactttttctatcggtcgcatccgccacacaaaattcaatttgttttgcatattgtgattgccgtcttttagccaattctatcatttttttgctgtaatcaaaagcgacaaccgaagcgcctctttgtgcaagatacgaagaataatttccattgccacacgcaatatccaaaatgtaatccgcaggattaggagatagaagttccgttactttgggacgcactacctctctgtgaaattcattagattcgtcacccattgcattatcccaaaattgtgcgttctcctcccagatttttttactttcctctgttcccatgttctctcccactccccaaatttgcttttttgcttccattaaatcttccttactatattccattgttaccctccataacttctgattgttgccgtcttgacgattatgtatctttacattaccttctgaaacatatggcgcaccttgtccaggcggctgtttggacggcggggctggatgaccggctgaccgacagcggcctgatatcctttcagctctgtaaggcatacgctccgcccgttggtgtaaaaggccagatcagtacggtatgcctgtatacagcgggcgggaatctcgccagtaaagacaacttcatccttttttacctgggccgtttcgatggtggcacagtatttcggtgcatcatgataagccctggaaaggtattcctggggcgcatagaggatgaaggagagataaggttccagcagctgcgtccccgattccttcaatgcctgttccaatacaatcggggccaatgagcggaagtccgccggcgtgctgaccggactgtaataaagcccgtattcaaagcaaatcttacagtccgttacgttccagccgaacaagccctgctccagcccgtaacggataccatccctgacagcgttttgaaaactctggttcaagtatcccagcgaaacccggctctcgtattgtacaccggagccaagcgagagtggtgtaacagacagtcctatggatgcccaaaacgggttgggcggcacctcgatatggatggtgtggctggctgctttgagcggccgctccatataaatgacggagggttcctttaccactgtttcaagcttgtatttttccgacagcaaagcggaaacaacctccaactgcacccggcccaaaaaagaaagaatgatctcatgggtgatggaatccacttcgcaacgcaaaagcgggtcagtatccgcaagttgcgtaagagcgtccagcagccgttctctttgcgctgccgttttcggcgcaatcgtcgtccgcagcatggggagggggtcctcgcgccaccttttacgagggagccgggtttggtcccctaatacatcgtttaacctcacgctgtcgctgggaaggataacaatttcaccctgataagcggtgtctgtccgaacaatttcccctttggatggaatacgcatctctgtgattttcagcttttctctcccggccagggccaccgtatcccgcaggcgcagcgttccgctgtataaccgtagatagacacgccgctggccgcaatcggtgtactcaaccttgaaaacgctgccgcatagggcggcgcccccctgttccccaatcggttggaacagccctgtcaccgcatccatcaacggttgaatgccaaggccatttttggcgctgccatgatagactgggaacagggaggcgtcttgaacccgctgctgttcctcccgcgcaagtttttcccggctgattggttctcctgcgatatacttttccaataattcatcgttattttcgatgaccgcatcccatgcttctatgtcggtattttcctccaggactatttccggggacagcgacaccgtctgcttgatgataatatcggcggagagcttatcccgaacagactgaaccacgctctgcaaatcaacgccagcctggtcgatcttgttgataaagataacggtgggaatgttcattttccgcagggcatggaacagaatacgggtctgggcctgcacgccatctttagcggagatcaccaagatggccccatctaaaacagccaaagagcggtacacctccgccaaaaaatccatgtggccgggcgtatccacaatgttaactttacatctgtgccactggaaggaagtgactgccgcttgaatggtaatcccacgctgccgctccaaaaacatggtgtccgtcctcgttgtccctttttcgacgctccccggttctgaaatggctccgctggcatatagcaggctctccgtcaaggtcgtctttccagcgtctacatgggcaagaattccaatattgattattttcatgtgattgtcctccctttacagccccaaagggcataaaaatccccagcagtaaaatacttttaccactggggattataagttgcggacatacacatatacagcatacacctgtttgtgattgctgtttttggggatatgtcaaaattgataaggcaaaagtattcttaaattgggtacaaaaaactaagcccctacaaaaggagctatcataatcctttgttcccactatttgattatagttttatttaagaataccttgccgcatattttttactccttttctggattaaatcattgtatcacatcagttttaggaaagcaagtacctaaaagaaatttttcttccccttatatgtaacaatcataccggcttcctagcgttcagaatgttttctgctgtctgctgtggtgtttggttggaattgtccaaccaaaagccgatccgtggtgttgtctgcattttactaaatacaaattcaatgtatacagaaagatataaggagtgggagggattccgccgtagttggcattgtaggaaaatccaaaagtttagattttcccacaatgcttatcttttggtctttggttcggaatagtgtagtgctggcggtctatctcttgttttcggttgcttgcttccttaccgtacatgagcattgctctgcgtatttaaatgagcattatgaattgacggaggaagagataaaggaagtgatggacgggtatgatccatcatacaaagataatcagagcaatctggagcggatgatgcaggagcgggcattttcccatcttacggaataaaagcgagggcgtgtgcgaagatgatatgtaaaaaatgcggatatgattatccggcgaaagaactgaaatgtccctactgcggggagccaaacccgcttggagaaaagtggagaaacgaggaaaatctggcgagaaaggagacactgctcgccaaagcaaagatcatccattccatgccgctgtatgtggcggataaagtgatgaatgtaattctgctggttgttgtggcagtgacagcacttacatttctcgtgctggcgattgtgtttgggctggaggggattcacattacccgccagcacaaccaggcatctgtgcaggaggcagaggaactgcttgtggcgggagattatactggtctttacgattatctcaaatcccatcaggtatatggacaggaggggtttaaaaaatatacagagcgcgtccggctgtatgacgacgatcaggcatttatgagagatctgttccgcatccaggaggtgttagactggccggccgggcagcagatcagtccgaacgatgtaaagtatgtactctgggcgggaaagaatatcctgggaagagagacgggtgattcctaccgcaagctggaatatgaagaaaacaaggaatattacaatgacatgaaacaggacgtggcagcggcactgcttggcacctttggaatgtcagaggaagaactgtcagagctgatgggcatggaacgtgattcggagaaggtggacgaactggtacgccggatctttgagagagagggctgggaatatgaagaagattaagaatctgaaaatgatgtggaaattttcagatgagaccggaaactatgaggtaagtatgccgatgctggcagtaaaggcagcaggatgtgtgatagcgctgtttttcgtgttctcggttctgtgggctctgattgctaccgctgtggatgagggaaaatattccggcgatgcctatcatctggactggtgtgagcggaagtatatagaacgtaattacagtggactatataatacgttggatttgtatggactaaccagtgacaagtacgcttcctattgggagatggtgaacggatacagggatcacacgctgtatgacgcatatcgggcacttggtgagacggggattgacgaagtctcctacgagacggagaacggcacggcgacactgtcgatccctgtggaggaaaagcgcgttttctacgggcgcaaggtgcttgacaatgcgagtacctgcgaatttgaggagaatcagcgctacctgacgaagttcgcggatgaagtggaatagcagttttctaatgagaaaaatatttcatttactgcacttgacgaaacccttcttatttagtatagtatagctaaagttagttaagactaacttacatagcagaatacagagatatagcaggagggaaaagtgttggataagatttatgtagtatactggtcacagtcaggaaatacacaggcgatggcagaggcagtcggtgccggaatcactgcagcaggtaaggaagccgcagtggtggacgtaagcagcgtctctacagatgaattaaagaatgcaaaggcatttgcactcggatgcccggcaatgggggctgaggttcttgaggagggcgagatggagcctttcgtaaccgaggtggaaggatttgcggcaggcaagaccatcggtctgttcggttcctatggctggggagacgggcagtggatgcgtgactgggtagaccgcatgtcatccgcaggtgcgaatgtattaaacggcgaaggcgtgatctgtaaggaggcaccggacgatgaggctgtggctgcctgcactgatctcggtaagcagcttgcggcggtgtagttatgagcgttgtgattgtaggtggacatgaccgcatggtctgccagtacaaaaagatctgtaaggaacataactgtaaagcgaaggtatttacacagatgccggcaaagctcgggaaccagatcggatcaccggatctgatcattctcttcaccaacaccgtatcacataagatggtacggtgtgcggtggcagaggcggagcgctgcaatgcggatgtggtgagaagccataccagcagcggaagtgcacttacagagattctggagagggtttgcggataaataaaagagactgccgcatgacggcagattcccaaaagatcctggctggtccggttggacaggccgggatttttttgatgagaaaaataacacaataaaacacttgcaatatacccataggggggtatataatgagcctgcaaatgaggaatagaaacagacttgcgggtaaacagtaagaaagagggctaagcgtatggcagaggaaaaggaatgctgctgttcccataagacaaaggaacggtcagagaaagaatataaggatatgattcaccgcttgaaccgcatcgagggacagattcgcggaattaagggaatggtggagcgggatgcctactgtacggatattctggtacaggtggcagctgtgaatgcagcgctcaacagctttaacaaggtacttctcaccaaccatatcaagacctgcgtgacgaatgatatccgcgagggcagggaggagaccgtcgacgaactggtgacggtgctccagaaattgatgaaatagatgggagagggaggaagatgaagcaatatacagtgacgggaatgagctgtgcggcgtgcagcgcgcgcgtggaaaaagcagtgtcgaaggtgccgggtgtgacatcctgttcggtgagtcttctgacgaattccatgggtgtcgagggaaccgcggcgccgcaggagatcatccgggcggttgagaacgccggatacggcgctgccgagaagaagcggggcggcgcggaaaccgcgggagcggcggaggcgatgccgcaggaagagatgttaaaggaccgggagacgcctcttttaaaaaagagactggtgacttcggtaggctttctggcagtgctgatgtatttttccatgggacatatgatgtggggatggccgctgccggcgttctttgaaggaaaccatgtggcgatggggctggtacagctcttgctgacggtggtgatcatggtcatcaaccagaagttctttatcagcggattcaagagtctctggcaccgggcgccgaatatggacacactggtagcgctgggggcaacggcagcgttcggctacagtacctacgcgctctttgcaatgaccgatgcacaggtgcgcggcgatatggacggggtcatgagctacatgcacgagttctactttgaatcggcggcgatgattttgacgctgatcacggtcggaaaaatgctggaggcgcgttcaaaaggcaagacgaccgatgcgctcaagagcctgatgagcctggcaccgaagactgccaccatcgtgcgtgacggtgtggaacaggaggttccggtcgcgcaggtcaaaaagggagacgtcttcgtggtgcgcccgggggagaacatacccgtggacggtatcatcctcgagggcagcagtgccgtgaatgaggcggcgctgaccggcgagagcataccggtggacaaggcgccaggagatgaagtctccgcggcgaccgtgaaccagtccggctttttaaaatgcgaggcgatgagagtcggcgaggatacaaccttatcccagatcatccagatggtcagcgatgccgcggcgaccaaggcgccgattgccaagattgccgacaaagtctccggcgtatttgtaccgacggtcattggaattgcgatcgtgacactgattgtgtggctgcttgccggaaagccggtcggctttgcgctggcgagagcgatctctgttctggtcatcagctgcccgtgtgcgctcggacttgccgctccggtagccatcatggtcggaaacggcatgggtgctaagaacggtattatgttcaagacggcagtctctctggaggagaccggaaaaatgcagattgtagcgctcgataagaccggaaccatcacgagcggagagccgcgagttacggatgtccttccggcggaaggcgttccggcggaggagctgctgcatgcggcagggattctggagcagaagagtgagcatccgcttgcaaaagcggttcttgcctatgtgaaggagcagtccggggcaaaggagcagtccggcgggaagagggcgtctgtggcagacggagcatccggcggagaggacggctcagatatgctgaccgatttcatggcgctgccgggcaatggtctgaccggtgtgtgggatggaagccggctttacggcggcaatctcacttttatcgagcaacacgtgaaggtgtccgatgccgcgaagcggcaggcagagcagctcgccatgcagggcaagacgccgctgttttttgcaaaggatgagaagctgcttggcgtaatcgccgtggcggatgtcatcaaggaggacagcccgcgtgcggtggcagaactgcagaacatgggaatctatgtggtgatgctgaccggcgacaataagcggacggcgcaggcgatcggaaaagcggcaggcgtggacgaggtgatcgccggcgtgcttccggacggcaaggagcaggtggtaagagaactgcagaaaaagggcaaagtggtcatggtcggagatggaatcaatgacgcgccggcgcttacaagggcggatatcggaatggcgatcggcgccggaacggatattgccattgatgccgcggatatcgtgctgatgaagagccgcctgtcggatgtgcctgcggcaatccgcttgagccgcgcaaccctgcgcaatattcatgaaaatctgttctgggcatttttctacaatattatcggcattcctcttgcggcaggcgtgtggattccgctgttcggctggcagttaaacccgatgttcggtgcggcagccatgagcttatccagcttctgtgttgtgaccaacgcgctgcgcctgaatctgttccggatgtatgacgccggaaaagaccgcaggatcaaaaatgcggtgacagggcagaccgccgcagctgcggcgaaggagccggatgacgctttggagaagaaatcagaaacaaatcaaaaaaaggagaatgagacaatgaaaaagacaatgaagattaacggtatgatgtgtggacactgtgaggcgagagtcaagaaggcactcgaagcggtagaaggcgtgcaggaggctgtagtcagccacgagtcaggaaacgcggttgtgacgcttaccagcgacgtggcggatgaggtcttaaagaaggcggttgaggatcaggattacgaggtggtttctgtcgaatcctagaaaataaggtcaaaagtttcattgactttatgaggtcggcttggtacagtgaaaggtaggaggaatgttatgcgttatgtaccactcaagaaggcagaaccgggcatggttcttgcagccgacctttatgattccgtcggaagaacgctgattggctgccattgcgaattgacggagagctatctggaaaaactggaagcttacggattcgacggtgtatatatagaagataaactttcagagggcatcacgattgagagtgtgattacgccgcagttaaggcaggagggacaggagcgcatccgtgcctgcgacattgacggatgtaagctgattgccagacgcatggtggaggagattttatcctgcggaaatgtgtctcttgatcttacggacttaagaagctacgacgattacacttacgcacattctgtgaacgtggcggtatactgcggcgtcattggaatgggtatggggatgagtgaagtggagctggggcatcttgtgactgcggcattgcttcatgacctcggaaagctgcagatcccggatgagatcttaaacaagccgggacgtctgacacaggaagaatatctgattatgaaatcccacgcaacactgtcgtaccagattatcagtgagcggtgggatatttctgcgcatatcaaggaggccgtgctgcatcaccatgaaaatgtggacggaagcggatacccggacgggctggaaggcgcgcagcagacgatatttaccaggattctgcacgtggcggatgtctatgatgcacttacgtccaggcgcccgtacaaggagccatacgcaccgtacgaggcgacagagtatctgatgggcggctgcggcatcatgtttgaccgcgaggtagtggagacacttctaaagtatgtgccgctctatccgaagggaacgatggttacgctttccgatggaagagaagccatcatctatgagaattttggcgtacataatttaagacccgtagtgcgtctgatggacggggaactgttggatctgtccaacgaagcgaactaccatattacattgcgtatgaagacggaatccggcttctccacggaagaggcagaaaaggagcgcaacgagatgatacgcccgccggtacgctgccggatcatggttgtggacgatatgaagacgaatctgcagatgctgcgtggcattttagagccgttatatgatgtcatcctgatgaaatccggtcaccaggcattgctgtatttgaaaaaacatccggcgccggatctggtgctgatggatatcgatatgccggagatggacggcatcgagacggccaaacgcattatggagatgacggatcacacggtgccgatcctgttcgtcacggcgctttgcgacagacagacggtcacgctgtgccggaatctggatgcggcaggttacattgtaagaccgtacaagccggtctttgtcaagacagagattaagaggattctgatggggcggagtgagattgaatgatattattggttcagataatatgtctttgttatacgctgtatgtactgcaggaatatgccacttccggtgcatattccagacagcacaggctgctgccgctgctggtcggactgatcggtgtatataatttctatcaggttgtccttacgctcaccggacagacagaactgttcgggcgtttgaaggacatgctcttaattcaggtgctttatctgattcttatctatatcatggattttctgaaaatccatatcccctacggggtgcagtggattatgttttgtgtgctgctcgcgctgaatgtgattgtttttatgcgctaccggcagccggaaatctatcacatttatttcagaatttacttaatcggatgtacggcggcgatcgttgcaatgggaacctacgcctatctgcgccgttccctgaccatgcatgagcatcagattgctaatctgctctatattgtgctgctcgtgaatgcagcagcgatgtgcgcggaaaagttttttactattccgggcaatcttctgatgctggcagctacaaccggtgtctgcggtgcggttcattatctgatccagacggatcagctgatggatacgggcgagcttctgcgcgagcggctgtacgatgactcggatacggcagtggtactgctggataccaatttttactgcgttgatgcgaaccgcagcggcagaagtctgtttgcgggtccgatgcagttgtatgagagaaacagccgcaggcaccgcggatacatgcaggaggcggaggagctggcgaagtccatacaggagggaaaaaagagccgggagatcgagaagaacggacagtattatcagtgtcagtgtacgccggtgtactattcagggaggcttcgtggatatattctcggtgcctgggatattaccagcccgaaaaaagagacgcagctgatgcaggcattaaagggaaaagcagagatgcagacggcgcggaaaagtgatttcctcgcgcagatgagccatgacctgaaaagcccgctgcacgccatcatcggaatcacggatattttaagcagccgcaaggaactcacggcaagtgaccgtgcactcctgcttcacatcaagggagctgggaacagccttgtggaacaggtgaatgcgattcttgactattccagaattgaggcaggaaagttcgagctgatggcggagtgctaccggctggatcaggtgctcgaggaggtggcacacatgtgtgtcatcaatctgcagtcgaagagggtgtggtttgaggcctgtatacagggagaattcccggagaaaatgtatggggatgccatgcgcgtccgggaaattttgcagaatctgctcgcaaatgcggtcaagttcacagaggagggcgagatccgctgtgtgattacctgtgaggcaatccgggattcctcggatgtgatgatccgctgcagggtgtcggacaccggcaccggaatgacaagcgaacagctgcggcagggatttgattcttatgtgagctatgcggcagagagcggacagtcgggaaacggactgggacttagcattgtaaaggaacttgcaaaccgtatgggaggcagtgtccgcgccgagagcaacggcaccaggggaaccacgattaccgtggaaatccggcagaaggtgtgcggaagcaccctgcatgatgcggtgtgctatacgacggacagtctgctgcgcgagtcagtggtctatacggagcggatccagccgacatggatctatccgggggcacatgttctgctcgcggatgatatgcggatcaatcaggagattttccaggaactcgcagcgccgtggcggtttacactggatgttgtgcgcaacggaaaggaggctgtggaggcggcagcgcggaaggagtatcagttgatttttctggatcagaggatgccggaaaaaaatggcgatgaagcggcgaaggagatccgccagttttgcgatatcccaatggtacttatgactgctgatattaccgcggaattaaagcatcggaatcgcagaccggaatttacggcgtatctggacaagccgatcgatgtgtcagagctaaagaaagtgattgagacttatctgcctgtcgcagagcgcagggatttcctgcttcacgcgcagatgaaccatggggcataccgccgtctcttgcagacgtttttgcaggagacgggatcgctttctgcagaactgccgggctatgtgccggagcagctggagcttttcggaacgaaagtgcacggaatcaagggcgccagccagcagatcggcagacaggcgttaagcgagagcgcagaaatcatggaaatggcggcaaagacagaaaatatccggtacctggaaaagcatatgacagagtttttggagacgatccggcacacgttagagagtgtcgaggatgaattaaagaatctgccgcaggagatacagggggaaggcgcagccacggcagaggacataccggaggaaaagcagcagattctggcgcagcttagggaagcttttgatgcgtgtgatttaaacgggattgagcagggactttcccggtttgcgcgtgcccatctgacagcgaaggaacgggaactgttgacagaactgcatgcggcatatgagaacctggattacgaagagggaagcgaactgctttccggccggatgctgtgatagaagtgaaagaaaaaatgattgttttgtacaggttacgcgattgatagtgtgagaaaaattcccctcgcagagatatactgtgcgtagaatagaaatccggagttcccggagcagctgacaggagatctgcagcaaatttgtacagggggaaaactatgaatctggcagaaattacacatcgggcgtattttttagactgctatccgcttgatgagagacatttaaaaataagtattcagacaggaaaagatgtggacgaggtgatcctctgggcgggtgatccatattccgccgggattgccgaaaatgagcagaactggcagggagagcgggtgccgatggaactggagcgggaactggcacacagaaatgtatacagtgccgtcctcacaccggcgtaccgcagagtcaagtaccattttgagatcaccggaggcggggagagcgtctgcctgtttgaggatggatttgtgaaaaacgcagagcattttccggaggaacggatgatccagcgttttatctatccgtggatgaaccgggcggacattatgaaggtgccggaatgggcggagaatatcgtgtggtatcagattttcccggatcgtttctgcagaaaaaatccaggagaaaagcgtcattcctgccgggaatgggcttgtcaggaggatgcaacatggaaggagttttacgggggtgatctggcgggaatccgcagccgccttgcctatattgcagacctcggcgtcggaggtatttacttaaatccgattctgtggtcggattccaaccaccggtacgacacgatcgactaccacagcgtggagccggatatcggcacggaggaagaactgaaggcgttgattgcggaggcgcatgcgctgggacttcgtgtgatgatcgatgcggtattcaatcattgcggagcgaagtgcgcgctctggcaggacgtgctggaaaagggaccgcagtccgactattaccactggttttgcgtgaaccgctggccgatcgatgagcagacccatgcgacaaagcagggggattatttttcctttgcgtttgttgacaatatgcccaaatttgataccagcgagccggatgtgatggagtatcttaccggcattgcgaagcactgggtatgtgaatggaaggttgacggaatccgtttcgatgtcggcaacgagatttcacatgcatttttaaaacatctgcgtctggaattgaaaaagtgcaatccaaagcttttcctgctcggagagatctggcatgatgctttcccatggctgctcggcgacgagtatgattcgacgatgaactacccgtttctggcgtgcgtgaataacttctgggcagataagacacagagtggtacggattttatgcatggcatcaaccagtgctacagcatgtactacgagcaggtggaccgcgtgctgtttaatctgttagattcccatgatacggatcgtctgatggagagatgccacggcaatgcggatacgtttctggcacagcttgcgattctgttcaccatgcagggcgcgccgggtatctactacggcaccgagatcggcatggacggaggcggaacaaaggcgaaccggaagtgcatgccgtgggaggagatcgatgcgggcagctttgcggagctgaccggacaggtaaagcggctgattgcgatgcgcaggcagtatccgcagacaaggagcggaaaagtggtatgggatgtcagagaggattccagattgttacattattataagaaaaaagaaggacaaaaaacgctggaggtctgcattaacgccggggaggaaccggtgcggacaggggagcggggactgccggagccggaggactgcctgttcgcgaacggattggagcacggaagcttaagaccgcagggcgttttcataagattagtgtgaacatgacactgccgtatcggatcccgtctgatgcggcggtgtcagcagctccactgcaatccggaggcagagtgtctgcatggattccatatcaaactgactgcagagggaagtctccagctgggtgtgcgcaaagctttccagaagctggatacctaaatagatgcgttccctgagcgtcggaagtcctgcgtatgcggggggacatttctgcacgagggtatcgactgcatcgagcagaatccggtgataggcatcccggacatccgggtcgatatggcgcaggctctctaattcctcgtggagggcataatattccggtgcaggccatagaactgcccaagcacgtaggcaagcatgtcctctggcgaggaaaaggagcggaggctggaatccggtgtcccgaaaaaatcctggatgttctcataatggtaggcaagcgctgcgagcagcatttccttcttgttccggaaatagcggtaggcacttccggtagacactcccgctgcggcagcaattttgtctacggtgatattgtgatagccacatgcggcagtctgcgcaagggtggcttctaaaagacgctgccttgtcctgacagccttgtcacgctgtggtgtcctgttctccatagggcagctcccttctataccggcatgcacatgaaggagtcgaccgtctgaagcacaggggcggtccagctgttgtcaccaaacagccactgctcatgctgcatgtcaaattcgcagatatccggattggcaaaatgcatttcataccgctttttatattttttccccatcttatttgcatagataaaatgcgccctggtgtgcggtacgtcgatctgtctgcccagatgggtgagcagatcagatggtacttatctgccagcgcatccagcacactgccgaaattggtctgatagttgtagcaggtgcccggcagaagcggcaaggtctgcccgttctctgctccgaattccctgtattccataatgatcgcccagcctttccatattcaaaaaatgagatatatctcactttttgaatatggcggaagaaggacggcttgtcaagggaaaggtgcagaaggtattgcacaaaaagccccggacagccaaaatcttctgtgttttttgttcgcaggtgtgataaaatgaatttacaatggtttttacaggaaaatgtattgaggggaaattcatatgttaaaggtttttttagcggaagatgagatcgttatgcgggagggcataaagaacaacatcgactggcagggggaaggctttgaatttgttggtgacgcgggcgacggggagctcgcctatccgatcatccagaagacgagaccggatattctgatcacggacattaagatgccgttcatggatggactggagctgagccgtctcgtgaagcacgagctgccggagaccaagatcatattcctgagcgggtatgacgagttccagtatgcaaaagaggcaatcgacatcggaatcacggattatctggtgaagccggtcacgggtgcacagctgatcgggacactcaagaagatcggtcagaagatcgaggaggagcgcgggaagcagaagcagcaggcgccggaggaggcgagatctgccggcaggcagcggctgttccggcacatggtctccggaaagcatacctatgcgtcggtgttccaggaggcgaaggagctgggacttgagctgattgcggagcagtacaatatcatgctgctccagctgttctccgaggagaaggaggatgtcctgccggagaagataaaagccttcgagcaggaactggagaagtacatggagcagtccggcaatctgattgtcgcaaagcagagccgggcggagtacgattttgtgctgaagggcacagggcagcagtctctcgcggagacgacagagcaggtaaaaagcctgctggcagagtatttccggagagagacggcggtggagtatgtcgcggcgctcgggacaccggtggagcgtttcagcgagctgcagcagtgctaccggcagaccaacctgtgcttttccagacgctattcggtagagcgcaaccagatccttgaggaggagacgccgggggagactgcggcggaggttctggaggatgtaaagctcggggagctgaatatctccagcctgagccagcggcaggcagaggcttttctgtacacgggcactagggaggaggtgtccggcttcgtggaggattactttgcacagctcggggacggcaatgtaaagtctatcttcctgcgccagtacgtggtgatggatctgtatgtgacggcggtttccgttctggagaagagcggttacaagagcagggatctcgtggagcggtgcggcgatgcgaaggagatggtagcctacctgaccacggttgagcagaccagggaatatattaagaagcttttttcggcggtgctggatttgcgcagtgaggcggtggacggaaaatacgacggcatcatgcagaaggcaaagacctacatcaacgatcattttgagaaggacgggatttccctgaatatggtcgcagcggaggtaaatctgagtccgagccatttcagcacggtattcggtcaggaaatgggagagacgtttgtagaatatcttacaagaatccgcatggaaaaagcgaaggagctgctcaggacgacgggaaagaaggtaacggagattgcctttgaggtgggctaccgggatgcgcattatttcagcaacctgttcaagaagacgcagggctgcacaccgggtgagtaccgcagcagagggtaaaaggggagatggatattgaagagagggttttcactaaagagcaggctctatatgctgctgctgatctgtgtggtgccgctgaccatacttctggcgtatcttctgattatgacgaacaagatttcctccgagtatgacgggattgtcaggagaatcacaaaggcaaacgcgtacaacatcaatttcaaggaggacatggactacgtgatgtatattatcgtagtcaattcggagcgtgccgaggagctggtggacacggagcagccgcaccggatgatacaggccgcgcgggaggtgttcggcgagctctatgaggaggcagattccgagtacgctgcgaaccggctgtcaagcatactaaagagtcttgacacgctggaggatcgtgtggaggagatcgagaaggatgcgctcgtgaccgggctttatgagacgaacatggagcgtctggatctgaatatccgcgtcctgacggagctgatacaggagcagatccagtattatatctactatgagacaacgaacatggaggagctgcggatgggaatccgcgcggatgtggagagtgccatcacggcgatcacagtgattctcgtcctgatactgctcggggcatggatggtcagcaggaggattgtgcggggcatcacggagcctatccagcggctgtgtgaggctgcgcaggcagcgggaagcggggattttgcgatccgggcgcaggacgaggagctggatgagctctcggttctgaacagcagctttaaccagatggtggaggagatcgggcatctcgtggaggatatacgcgtggaggagctgaatctgcgcgcggcggagctgcgcgtgctgcaggagcagatcaacccgcattttctgtacaatacactggacaacatcatctggctcgcggagtcgaaggacacggagcaggtcgtgaggatggtgtcgtccctgtcaagcttttttcggacaaccttaagcaaggggcgggagttcatcacggtaaaggaggaggagcagcacatccgcagctacttagagatccagcagttccgctacagggatatactggaatatgagattgcgattccggaggagctctatgaatatgagatcatcaagctgacgctccagccgcttgtggagaatgcgctctaccacggcatcaagaacaagcgcggcggcggacatatccgggtgtccggtgcactctgccaggatgtcatgattttcaaggtgcaggatgacggaatcggaatggacggtgcgcggcttgcgcaggtgtgcgccatgctccgcgacggggagcaggagccggagccggaggagacgggcggcttcggactgttcaatgtcaaccagcgtatccaactcaattatggcagggagtacggactgaagatacagagcacctacgggcagggcaccgagatctgggtgcggattccgtgccgggcagagaaaatcaaaagaaaacgcaacatttccaaaaaaattacaccttttgaggaaaatacggcaaaattgtgaatgagctgttcataatttagtaaaaaattatacttatttcaaaagccagtcggtattttttaaaccgtccgaaagctataataggtacatggttaaggacttaaccaaatctaataaaaactttgggaggtttttaaaatgaaaaaaaagttagtgagtgtactgatgtgcatggcaatgggcgcaaccttactggcaggctgcggaagcgaggaggctgctgacagcagcaacacaacggcagcagatgcagcagacgcagatacggcagcggacagcgaagcagcggatgcttctgacgcagcagatgcggcagacgcagctgacggggatgtaatcacaatcggctttgcacaggttggtcatgagtctgactggcgtaccgcatccacgaattccgcacagtccatcttctcggcagagaacggatatgatctccagttcgttgactgcgaccaggattcggcagtccagctggaggcagtacgtggcttcatcgagcaggatgtggattacatcatcatcgacccgatcgtatcgacaggctgggacacggtactgacagagtgcgaggaggcaggtattccggttatcgtcattgaccgtacgattgatgattcggacaaatatatttcatgggtaggctccaacttcaagaatgagggtcttgcagcaggtgagtggttaaaggcttacacggatgcaaagggcatcagcgacgtgaacgtgctcgttatcgagggaacaaccggtgcttccgcacagatcggacgtacggacggcttcaaggagatcgcagatgcaaacggctggaacattctggattcccagaccggtgatttcacacaggctggcggacaggaggttatggagtcttacatcaagagctacgagggacagttcaatgtagtggtatgccagaacgataacgaggcatttggtgcgatggatgccatgaaggcagcaggtatctcctatggtgtggacggagacgtgatcctgatttccttcgatgcctgcaccgcaggtcttgagtatgtaatgtccggcgacatcaatgcagacttcgagtgcaacccgcttgcagctccgtttgtagaggatgttatcaagcagttagagtccggcagcacacctgacaaggaagtatacatggttgagcactggtatgtaaatgaggacatcctttcatccatcacggtaaacggcgaggagcaggagcttaccgtggttacacaggagatcgttgacgcacagtattaagacggtctggcaacaggacaaacattatagcagggacagagaagaagctgcttcacagacagggaatttgtaatgggggaggcccgttggtctctcccaattttaaggaaagggtggagtaaaatggagcataatgtggtactgaccatgcgggggattaccatgacatttccgggcgtaaaggcactggacaatgtggatcttacactgcggaagggcgagatcatggcactgatgggagaaaatggtgccgggaaatctacactgatcaagtgtctgaccggaatcaacgcgttcgatgcgggagaaatacgcgttgacgggatcgatggaccggtggtcaatcattcgaccctggatgcacagaaaaagggcatatccacggtgtatcaggaagtcaatctttgcccgaatttgagtgtggcagaaaatttatttatcggcagggagccgaagacaaagcttggaaccatcgactggaagacgatgacagcaaaatccaacaggattattaagagcctggatcttgatattgacgtaaccaaaaatctggaagagtattcactggcgctccagcagatgattgcgattgcaagagcggtggatatggattgtaaggtactgattttagacgagccgacatcctccctggatgaccatgaggttgaaaagctgttcgttcttatgcggcagctgaaggaaaagggtgtggcgattgtgtttgtgacacactttctggagcaggtatacgcagtctgtgaccggatcacagtgctccggaacggcatactggtcggagaatatccgattgaggagctgccaagggtaaagctggttgcagcgatgatgggcaaggattttgatgaccttgcagctgtaaaatcagaagagaagaaggatttcaccaatgtgccggtggttatcgacgcgcagggcatgagccacaagggaaagatcaagccgtttgatttacagatacataagggtgaggtcgtgggactgacaggtctgcttggctcgggacgcagtgagctggcgcgtgtcatctatggagcggataaaaaccagacaggtaagctgtttgtcaacggaaaagaggcaaagatcaatgcgccgattgatgcgatgaatcttggaatgggacttcttccggacgacagaaaggcagagggcattatcgcagacttatctgtacgagaaaatataattctggcaatgcaggcaaagcgcggaatgtttaagctgcttccaatgagcagacagaacgagatcgcagacaagtatatcgagctgctgcagatcaagacggcgagcagggagaccctgatcgggcagctctccggcggaaaccagcagaaggtgattctggcacgctggcttgccacagatccggaattccttattctggatgagccgaccagaggtatcgatgtcgggacaaagactgagatccagaagcttgtgatcgagcttgcggatcagggaaagagtctgatcttcatctcttccgagattgaggagatgcttagaacatgctccaagctggtggtattaagggatggtcaggaagtgggagagatcactgaggaactgacccaggggcatgtaatgcagtccatagcaggaggtggcaggaatgagtaagtttaagaagctggtcagccagccgttgtttttaccgattttctgtatgatactggtgatggcggtaaatatcatctatgatgtgatggcaggaaattttgcatttaacttttttaccatctccatccgcaacggggtattgtacggacgcatcattgatattttaaaccgcggcagtgagattgccgttcttgccatcggcatgacgctggttgtgtcctgctcggcaggaacggatatttccgtcggctcggtcatgtcactggcggcatcgttctgctgcatgcttctggcaggctacggcgtgtcctccaccaacagccttgcagcgccgctgatcgtcggtgtgcttggcggcatcctgatgggatgtgcctgcggtgcgtttaacggttttctggtatcgtatctgaatgtgcagccgatggtggcaacgctgatcctgttttcggcggcgagggcaatcggacttctgctctgcaacaacatgatcgtatacgtccgggatgattccttcaaaatcttcggcggctatctcggatttatgccgacaccgatcgtggttgccatcgtgtgcatcctgatcacatcgctggtgctccgcaagaccgcactgggcttatatatccagagcgtcggcatcaataagaaggcttcccgcatcgcgggcatcaattccgagcgcatcattttcctgtgctatgttgtctgcggattgtgtgcaggaattgccggcattgttgcttcctcccggatcagctctgcggattccaacaacatcggactgaacttcgagctggatgcgattctggcagttgcactcggcggcaacagcctcggcggcggaaagttccggctggcaggctctattatcggtgcgtacaccatccaggcgatcaccaccaccctgtatgcgctcggcatctcgaccgagcaggcaccggtgtacaaggcggtcattgttatcattattgtggcaatccaggcacctccgtttaaggcatttatgaaaaaaatgtctgtaaggagacagcttgccaaaggaggtgcggcataatgaaagcgaaaaaattaaatggaaatacggttcttctgataattaccatcgcgttattttttgtgatgtatgccgtgggctgtgtgatttattccaataagggcttcacacatctgcagacgtttttgaatatccttatcaataatgcgggtctgctctgcatcacctgtggaatgacctgcgtgatgctgaccggcggcatcgatatttccgttggctcgctggttgccatggactgcatgattcttgccgtcggcatggagcgctggaacatgaatgcggttctgctctgcatacttgtgcttgccatcgggattgtgttcggcgtggtgcagggcttctgtgtcggctatctgaatatccagccgttcattgtgacaatggcgggaatgttcttcgccagaggcatgacagccgtgatcagcacggaacagatctccatcagcagcaatgcattttttgtaaagcttgccaatacgaagatcagccttccgtttggctcctataccaacaacaagggcgtggtgcaggttccgtttatccgtgtatcggtaatcgtggcgctgctcgtgctgatagccgtatttttcatgctccgctataccaagttcggcagaagcctttacgcagtcggaggaagtgagcagtcggcgaccatgatgggactggacgtgaagaagacgaagctgaaggcgtatgtgctttcctcattcctctgctcgatcggcggcatctgctactgtctgaacacgatgtcgggaaatgtgcagcaggcactcggacttgagatggatgccattgcttcctccgttatcggcggtacattattgacaggcggtgtgggaaatgtcatcggctccttctttggtgtacttatcaacggaacgatttccacactggtgaagacgaacggcaagctgctcagctcgtggtccaacattgcggtggctgcgctgctctgtttcttcatcgtattacagagtatctttgcaaagatcaaagagaagagcaaataaaaacaaggctgtccaggggctgtccgcttcatgcggcagccttttggctcttctatgggaaaataccgtgctgcgttaaaaaagcacctcgggcaggaggtgcagccggcaggagaaaaggcgggaggaatatgaacatatttcagaagaggactgtgggaaaaaaaggaatcgcggcggcgctgcttgccagccagctgctctttacagccggctgtgggagtggggagcagagagagactgcgggacagctggatacggagcagacgatgcagcaggacggctgtattgtggtcggatatgtgcaggtcggctcggaatccgactggagaaccaccaacacacagtcctttaaggatgtgttcacgcaggaaaacggctactatctgatcttcgaggacggacagcagaagcaggagaaccaggtgaaggcaatccgcaatctgatcctgcaggaggtggattatatcgtgctcgacccgatcgtggagacaggctgggaatccgttctggaggaggcgaaggaagccggaatcccggtgattctgtctgaccgcagggcggagatggaggacgacagcctgtatacatgctgggtgggcagtgacttcgcggaggagggcaggaacgccgggcactggctggagaattatctggaaaagcaggggcggagcggggagacagttcatatcgtatctctccaggggacgctgggctcctctgcacagatcgggcggacagacggattcgcagaggttctccagcagaatgaaaactgggtgatgctggagcgccagtcgggggatttcacgcaggcaaaggggcaggaggttatgaaggaatttctcgaaaaatacgaggatattgatgttgtaatcagcgagaatgacaatatgacctttggcgctatcgaggcgatccgggaggcgggcaggacgattggcagtgacggggacattattatcctgtcctttgatgcggtaagggatgccctcaaggcaatccagaccggggacatcgcggctgattttgaatgcaatccgctgacagccccgcttgtggaggagacgatccgccgcctggaggcgggggaaagcgtggagaagatccagtatgtggaggagacatattttgactgtgagatggatctctcggagctgttggagagcagaccatattaggcaggaagtccctgcttctgctggcggtaaaattatctgaaaaaattagcactcacctcttgacagtgctaacaactagtgctataacataattgtaacagggagaacaaagcaggcggcgcatagatatgtgccgcctgtatatcataggaagagaaagagaggtacgcttatgaacattcagaaatttacacaaaagtcagtggaagccattaacgattgcgagaagcttgcctatgaatatggaaatcaggagatcgagcaggagcatcttctggttgcactcatgcggcaggaggatggactgattccgaagctgattgagaagatggagattcagaaggagcacttcatggataacgccgagcggcatctggcagcgcgtgtcaaggtgtccggcggtcaggtctatgtcggacaggatttaaataaggtgctcattcatgccgaggatgaggcgaagcagatgggagacgagtatgtttctgtcgagcatctgttcctagcgctgatcaagtatccgaataaggcattgaaggagatctttaaggagtacggcattaccagagaacggtttttgcaggcgctctcgacagtccgcggcaatcagcgcgtgacatcggacaatccggaagcaacctacgacacgctggagaagtacgggtatgatatggtagcccgtgcgagagaccagaagctggatccggtcatcggacgtgatgatgagatccggaatgtcgtgcggattctgtcccgtaagacgaaaaacaacccggtgctgatcggtgagccgggtgtcggcaagacggctgttgtcgagggacttgcccagcgaattgtaaaaggcgatgtgccggagggcttaaaggacaagaaattgtttgcactggatatgggtgcgttaatcgcaggtgcaaaataccgcggtgaattcgaggagcggttaaaggcagtgcttgatgaggtgaaaagttccgagggacagattatcctgttcattgatgagcttcacacgatcgtgggtgcgggcaagacggatggtgcgatggatgccggacagctgttaaagccgatgcttgcgcgtggtgaactgcattgtatcggtgcgacgaccctggatgagtaccgcgaatacattgaaaaagatgcggcgctcgagcgtcgtttccagccggtaatggtggatgagccgacggtcgaggataccatctccattctgcgtggattgaaggaacgctacgaggttttccatggagttaagattacagattctgcgctggtatcggcagcagtgctctccaaccgttatatttcggatcgttttcttccggataaagcgatcgatctggtcgatgaggcgtgcgcgctgatcaagaccgagctggattccatgccgacggaactggacgagttgaaccgccgtgtcatgcagatggagattgaggagacagcgctgaaaaaggagaccgaccgtctgagccaggagcgtctggcaaatctgcagaaagaactggcagagctgcgcgatgaattcaacacgaagaaagcgcagtgggagaatgagaaaaagtcggtagaaaaagtacagaagctgcgtgaggagatcgaagcggtcaagaatgagatcaagatggcacagcagaagtacgatctggagaaggcagccgaattgcagtacggcaagctgccacagctacagaagcagttggagatcgaggaggaagccgtgaagaaacgcgacctttccctggtgcatgaaaacgtcagtgaggaagagattgcgcggatcatctccagatggacaggaattccggtggcaaagctgacggagagcgagcgtaacaagacgctgcatctcgacgaggaactgcacaaacgtgtcatcggccaggatgagggtgtcacgaaagtgacggaagcaatcatccgttccaaagcaggtatcaaagacccgagtaagccgatcggatcattcctgttcttaggaccgaccggtgttggtaagacagagcttgcaaaggcgcttgcagcaagtctcttcgatgatgagtcgaatatggtgcgtcttgatatgagtgagtatatggagaaatattccgtctcccgtctgatcggagcgcctccaggatatgtcggatacgatgagggtggacagctgaccgaggcagtgcgcagaaagccgtattcggtggtattgtttgatgaggtggagaaggcacatccggatgtgttcaacgttctgttgcaggtactggacgatggacgaatcacagattcacagggacgtaccgtcgattttaagaatacaatcatcatcatgacatcgaaccttggatcagcacatctgcttgagggcatcgatgcaaacggggatatcaatccggagtgcgaagcggcagttatggacgaactgcgcggacatttccgtccggagtttttgaaccgtctggatgagattattatgtttaagccgctgacgaaggacaacatcggtaacatcatcaaccttctggttgcagatctcaacaaacgtctggcagaccgtgagatcacggtggagctgaccgatgcggcaaagcagtatatcgtggaaaacggatatgatccgatctacggtgcaagaccgttaaagcggttcttacagaagcatgtggagacactttccgcaaagctgattcttgcggataaagtcagggagggagatacgattctgattgatgtctccggaaatgaactgacggcagcagtgaaagcgtgagggttgatctaaaacaggaacagagaagagggacggaggcagaaagcctccgcccctttttttgtgtaatagggaacttcgttcctattacacaaaaacgctccgcgaggatgcgcacctcgcggtgaggtaaataatgctttgcataccgcgagggcgcgcaagtgtgcggcaagcgcacacgttgttcttgagtgaaacgaaagattgaaaaatgcctgtgaagtcattaaaataaaacagatactacatattttaaaaggatagataccgatgtatttttcaaaagtgggacaggagcgatgaaaaacaggaagatcatgatagcaggaatgcttatctgtgcgataactgccgggtgcgggacggctttaccgcacgcagacgggatgggagagacggagcgagagacgaaggaagctcagttaaattcctcagatgagacagagaagatacaaagtattgcacaggcggaagagcagacagaaaattccgatgtggaggatgcggacgatcagcttgccgtcattgcgcggacaaggaatcagtgggtgaatgatccagattacgcagatgagatgtatcagtttgcgatagcagatcttgatcacgatggcagactggagctgattgtatcgaactgtgggggaaccggaatctatacgtacagcaggttttacagggtggaggagaatggcacgttaaaggaactgaagacgtcttttgtagagggggattcccaaccggatttgattgcggatgagcttaccgtgtatcggaaagaaacgaaagaaactttgcaggaatattatattgtgtatgatgatttgagggtttcgccagcggagcatctctatgcgacagacgccatgtctgttttggaggatgagattaaggtggagactctggcaaccatgtcatggctgtatgtggcggggaacagcggtgatgaaggggaggcgcagattgtctgtaaggatgcggacggaaacccgctgacagaggaggcgtatcaacagtatgcccaaacttattttaagaagcagggctatacggaagatacacttctgctccgctggacggatataggggaattcatggaaaaaacacaggagggggcagaggcatttttaaagaaaacctatgagtgaccctgcgcctttaaaaactcctgcagggcagcgcgttttgcttcataatcagatactccaagatcataaagcttctgctctagggcagcgtccctggagaaagtgccaagcggcagatggcggctcggcgcaaagattaaggcacgtccctctttttccagccggttggaaagatcaatcgaagcctgataattgatatggcggtggtcgatcccttcgatggtcttgggatatctgcgcagcatgcgcttgtagatcggccggtgtgcctccggctgcttcacgaaatcgcgcggatttgacaggatgatgacaaccttgtcgcagccgtgttctaaggcatggtgtaccgggatagaatcggcaacaccgccgtcgtagtagaaatgtccgttcacattgaccgggcggcagaacgcaggaagcgcgcaggtcgccatgatggtgcggtagtcgtcgcgcacgatgtcgaacttggaaaaataggctgcctttcctgtgagggcatccgttgccggcatataaaattcagccggatttttcatgatggcatcgtagtcaatcgggtcggcaccgtctgagttggtcagcgttccgtagatatattcgagcccgaagagattcccggtccgaagcaggctgcggacggaaagatagcgcggatcgtcaaggtgtacggtatagaagcgcagatttctgccgcgctggccggcaaggtaggagagggtgttggcagctccggcagagacgccgatacaatagtcgaatgtgattttatcatctaaaaacctgtcgagaatgccggcactgtaagcgcatttcatgccgccgccctcaacaatcagtcctgtttttcccataatggatcagatcctttctgctaattcacggaacgaattatagcataaataaaaaagaaatgcatctgtgtgaaaacgcagacattacaattcgtgatttcgcctaatagacatttgacggaagaatgatttataataatttttgtagacaggcacttcgcacagaggaggtacttgtatatgggagaacataacacctgaactactgcatctgtttgcgtatttaaagcagagcactgaggaagttgcagagatgcatccggatgaaaaaatccgtaatattcatgagagagtcaaatatctaaaacgtgatcgaaaattggaggcaggctatatgacgatggaagagtatatccgtgaggaagcggagcgaagggcaaaattgatagcaccttcgatagcggagtcaatggcggagtcgatggcagagtcgatggcggagtcgatggcagagtcgatggcagagacgcttgcggagtcgatggcagagtcgatggcagagacgcttgcgaagccgatggcggagtcgatggcagagacgcttgcgaagccgatggcggagtcacttgcagcgtcaaaagtagcacagagtatattgtcattagcagccgaacttggaactattccggcagaagagcagcagcgcatcgcaggagaacaggatgatgagacactggaaaagtggctgaaacttgctgcgcgctcaacaactgtggaagagttcctgtctggaatgtagagacgagtctgtctcattcttaagcggcgggtctgccgctgttatcaaccaaacaatttcgggacgtgtctgtctatctatttctgttatgggaaagcacgggaatgatccgtgaaaagatttgaataattccgttgttcataatataatgaaaaaacggaggatttattatgtcatttgcacatttacacgtccatacagagtacagtctgctggacggttccaataaaatcaaagaatatgtaaaacgaatcaaggaacttggcatgacagcgggagccatcacggatcacggtgtcatgttcggcgtgattgatttttataaggaagcgaagaaggcagggatcaatccggttttgggatgcgaggtctacgtggcaccgaactccagatttgaccgggagatgtcccatggggaggatcgctattatcacctagtgctgttggcggagaataaccaggggtatcagaatctcatgaagattgtatcgaagggatttgtggagggatactactataaaccgcgtgtcgatatggaacttttagaacagtatcatgaggggctgattgcgttgagtgcctgtctggcaggtgaggtgcagcgttatcttgtcagaggtctttatgatgaggcgaagaagacggcgcagcgctatgaggcatgcttcggtaagggcaattatttcctggaactgcaggatcacggaattccggatcagaagacagtgaatgccggtctgatgcggcttagccaggaactgggtattgaacttgtcgccaccaacgacgtgcactatacctatgcggaggactgggaggcacatgatatcctgctgtgcctgcagacagggaaaaagttgtccgatgagaaccggatgcgctatgagggcggacagtattatgtcaaatccgaggaggagatgcgcgcactttttccctatgccgcgcaggcaatcgagaatacccagaagattgcagaccggtgtcatgtggagattgaattcggcgtgacgaagctgccacactttacagtgccggacgggtatgattcctggacgtatctgaacaaattgtgtcatgagggactgatccagcgttatccggaccgccatgacgagctgctgccgcagcttgattatgagctttccgttatccagaagatgggatatgttgattactttctgatcgtgtgggattttatcaattatgccagaacgcatggcatcccggtcggaccggggcgtggaagcgcggcgggaagtcttgtctcctacacgaccggtatcaccaatattgatccgatccggtataatcttctgtttgagcgttttttaaatccggagcgtgtcacgatgccggatattgatattgatttctgctatgagagacgaagtgaggtcatcgactatgtaatcgggaaatacggcaaggactgcgtgacgcagatcgttacattcggtacgctggctgcgcgcggagtcatccgcgatgtggggcgtgtgatggatctgccgtacaatttctgtgatacgattgcgaagaacattccaaacgaactgaacatcaccatcgataaggcgcttaccatgaatccagagctgcgcaccatgtacgagacggatgacacggtgcatacactcatcgatatggcaaaacgtctggaaggactgccgcgccatacgtccatgcatgcggcgggtgtcgtgatttcacagaaggcgatggatgagtatgtaccgctttccagagcttcagacggcacgattaccacgcagttcgtcatgacaacgatcgaggaactcggtctgttaaaaatggacttcctcggacttcggacgcttaccgtaatcaaagatgccgttgcccttgtggagaagaatcacggtgtgcggatcgacgtcgatcacatcgattataatgacaacagcgatccggatgcgatccagattgattacggcgacaagaaggtgctggatgcgattggaaccggaaaatgcgagggcgtcttccagcttgaaagtgccgggatgaagaacttcatgaaggagttaaaaccgcagagtctggaggatgttatcgccggaatctctctgtaccgtccgggaccgatggatttcattccaaagtacattaagggaaaaaacgagccggagagcatcacatacacctgcaaggaactggaaccgatcctggagccgacatatggctgtattgtctaccaggagcaggtcatgcagatcgtgcagaatcttgccggctattccatgggacaggcggataacatccgccgtgcgatgagtaagaaaaagcagtatgtcattgatgcggagcgccacaatttcgtttacggaaatgaggagcaggggatcaaaggctgtattgcaaacggtatcagtgagaaggcggcgaatgagatctacgattccatggtggattttgcgaagtacgcattcaacaaatcccatgcggcggcatacgcggtggtcgcatatcagacggcgtatctgaaatattattatccggtggaatttatggcggcgctgatgacctccgtgattgataacccgcggaaggtggcggagtatatctatacctgcagacagatgggaatcaaagtgctggccccggatatcaatgagggcgagggacgtttttcggcgacgaaagacggcatccgctacggactgtatgcgatcaagagtatcgggcgttcggtggtggatgcgatcatagcggagcggaatcagaacggtccctaccgtaccctgcagaattttattgagcgggtggcggactctgaggtaaacaagcgcaccgtcgaaaatctcatcaaatccggtgcctgcgataccttagacggcaacagacagcagatgatgatggtgtacaacgctctgatggatcagcaggtgcagacgaaaaagaagtcgctggcgggacagatgagcctgtttgatctggtgtcggaggaggagaaaaaagcctatgagattcagtatcccaacgttggagagtacagcaaggagatcaagcttggctttgagaaggaagtcatcggtatctatctgaccggccatccgctggaggaatacgaggagaaatggcgcagaatcatatcggcagtgacgtcggatttcctgctggacgaggagagcggcgaggtcaagctgcgggataaccagaaggttatcatcggcggaatgattacggagaagaccatcaaatatacgaagaataataagacgatggcatttctcacgctcgaggatctgttcggtacggtggaggtgatcgtattccctggcgagtatgagcgctatcatacgctgctgaatgaggatgagaaggtatttatccgcggacatgccaacgtggaggaggataaaaacgccaagatcgtctgcgagcagatctgtacgtttgaacaggcagagaacggaatgccacaggaacagcgcacttaccggcagggcggaggataccggcgcggtgcaggcgggaatgcgggcagcagtccggcatccgcgggagacggcggatcaagccgtggcggtgcagccgcgcaggttcccgcgcggcgcggcgatgaattatggcttcagtttgagaccaaggaagcgtttgcggaaaaggaaaaagaactctatgccatgctccatgattcggatgggaaagacacggtggtgatctatatttcatcggtcaaggcgatgaagcggctgcccgaaaactacagtatctgcatcgaaccggagattgtgaacaatttaactaagtttttgggggaaaataacgtaaaagttgtcaaaaagagcattgaaaagaagccataaagagattaaaataagatagattaaatgggtatattatatgaggagggaacgataaatggcgaaagagataaacaccattggtgtactcacgagcggcggcgatgccccgggtatgaacgcagcaatccgtgcagtggttagggaagccattgcaaagggtaagaaagtcaagggaatcaagagaggttatgcaggacttctccaggaagagatcgtagatatggaagcaaaagacgtttccgatattatccagcgcggcggtactattttacagacagcacgctgcatggagtttaagacaccggaaggtcagcagaaagcagcagagatctgcaagaagcacggaatcgacggtattatcgttatcggcggtgacggttctttcagaggtgcgcagaagctggcggcactcggcatcaacacgatcggtcttccgggaacgattgaccttgatattgcatgtacagagtataccatcggttttgatacagcggtaaacaccgcaatggaagcgatcgacaaggtacgtgatacctctacttctcatgagcgttgcagcatcatcgaggttatgggacgcggcgcgggatatattgcattatggtgcggtattgcgaacggcgcagaggatatcctgcttccggagaaatatgattacgatgagcagaagattgtaaaccatatcatcgagaaccgtaagcgcggcaaacagcatcacattattgtcaatgcggaggggatcggacattctgcaagcatggcaaagcgtatcgaggctgcaaccggcgttgagacgcgtgcgacgattctggggcacatgcagcgtggcggaagcccgacctgtaaggatcgtgtctatgcatccacgatgggtgcgctggcagtggatctgctctgcgagggcaagagcaaccgtgtcgttggttatcgtcacggtgatttcgtggatgacgacatcgatgaggcacttgcaatgcagaaatccattccggagtatcagtatcagatcagcaagaacctttcaatgtaagatacataacagtatttggaacgatcataagactccatgggcgggaactcatggagttttttccgcttagggaacaaaaaggagcagtcatgattacgagcagcagcaaccagcagatgaaaaatattacggcattgatgaaaaaggcaaaagagcgcaaaagccagaacctgtttgtcgtggaaggcagaaagatgtttgaggaggtcccgccggagtggctctctaaggtctatgtctccgagcgctttctggaggaaccagaagcggagcagctgcttgccggaaagacctatgaagttgttgccgatgcggtatttaagagcatttccgacacacagacaccgcaggggatcttatgtctggtgcgcatgccgcagtacccgctttccgatctgctgcgcgggaacaggacacatctgctgatcgttgagagcatccaggacccggggaatctgggaaccatgctgcggaccggcgagggtgcgggaattaccggcattattatgaaccggacgacggtggatctgtttaatccaaagaccatccgctctacgatgggaagcatttaccgggtaccctactatattgcggacgacctggcagagacgatcggtgaattaaaacggcagaaggttggcatatacgcggcgcatctgaagggacagatgcagtatgacgaaccgtcctactgcaaaggtacggcgtttctgatcgggaacgaggggaatggattgtccgatgagatcgcggggctggcagatacctacgtgcggataccgatggagggaagtgtggaatccctgaatgcggcagtatccgcagcactgcttatgtatgagaccaacaggcagaggagaaggaacggaaaatgagaatctggtttaagatgatgaagaacaaccacttgctgcgggacacgacgatcacggatgagtccgatgagacaaggacgcacaaagtctttcatgcgctcgaggaagtgtgctatgaatttgatctcggaaaaccgatctggctggaggcgaatgtgaatgaattcaagcgccatgccaagacgcgctttacgcaggattcctttatcgagcagattgattttgattttctggaaatgcaggttatcgaggaggattaagctgcataagttatggaaggaaataaagaaccggtttcagcaggctgtgtttcgatttgcctaatccccccggaatatggtataatgtacataagcaatgagcagtgccaaaatcgtaacagcaaaaattgcctgcttgcagagcacattttcgctggcacgattttgatagggcgactgcccggtagtccaagaaatctgtgatttcttggacgtgtactgcgaaatacgcgcccgcgagtccgggaagccggaggttttccggacttttgccggagcgtattgcaataaatgataaggggagacatctggagggggaacatatggacaagccggttgcgttaggggaagtaaccctgggtgaaggcgtagatagctggaacaccattatttttctttataactcggcactcaaggaagtgagaacaaaggtcgagattttaaatgacgaatttcaacaggtacatcagtacaatccgattgaatatatcaagtcgcgcatcaaagcgccggagagcattgtcaaaaagttaaagcggtatggctatgactcctcgatcgacaatatggtgaattacatcaacgacattgcgggaatccggattgtctgttcttttacgtcggatatttaccgccttgccgaaatgatcggcaagcagaatgatctcacggtaatctccgtgaaggattatatcagacatccaaaggagagcggatacaaaagctatcacatgctggtgacggtaccgatctttttgtcggaccgcattatcgacacgaaggtggagattcagatccggacgatggcgatggatttctgggcgagcctcgagcacaagatctactataagtttgagggaaatgcgccggattacatcagcagggatctgcgcgagtgttcgggaatcgtctccatgctggacgcaaagatgctccagctcaatgaggcaattctggaggcaaaggcggcacaggaagagcaggagggagatacaggtgcagtataattatgattttgagatcgcatcactcttaattatgacaattatattactgcactttgtattcgtgcgccagtttcccggggagaagacacgggtattcggctggcttctgtttgtgtgtgaagcagagtgtctgatgaacattctatcatgtgtgggattagcaaatgcagccctcgttccgcagcgtctgaacgaggtactggcgtttgctttttttgtgctggagggggcttcgtcatatctgatttaccggtattttatggcggcatgtgcgctccgcggcagggagagaacggtatttgcggctgccggcatgattccgtttgccgtgtttcttgtgttggtggcagtgacgccggtgactggatttttttattactttagggatggcagttattatcagggcgtcggcgcggattacggatatgcgtatattgtgatcttctttttgttggggcttctgattgtcgtgcggcagcataaatataccacgcttcgcacgaaggtcatcgtgtgcgcctacacggctgtggcagccgccatgatcgggttgcaatactggcacagggagatgctttgcaccagcgtcagcaatacggtcgtgctcataatgctctatctgcagattcagaatccggtggtgtttctggacacgacaacaggaatcgggaacgggacggcatttgaatcgcagctggaggaccggctccgcagaaagggcgagggctatgtgctcacgattcatttgagcaagttttatcatatccacacgattctgggtaccgagaacagcaatgaactgctgcgcgagatcggggcgtatctgtataatctgtgtggaaaatttcatgtgtttcacacggcaggagatgcatttacggtgtttgcagacaccaaagagcagtgtgaaaggttaaaatgtgagatacaaaagcggtttgaaagtgactgggtggtgcaggagaaccgcattgcgctggatatggagatggtggtgcagcactatccgacggactttaaggcgatggcggaatattacggaatgcgggagtttttgcttgaaaatgcaggaaagtccggcgcgcaggtcattgtggatgcagacgcggatatgatcgcacagtaccgccgccgcagaaaagtggagattgccgtggcgagggcgatccgggagaagggatttctggtctactatcagccggtatattccctgaaggaacggcagattgtgtccctggaagcgctggtgcggcttaaggatccggaattgggatttatttcgccagaggagtttattccgcttgcggagcgcgacggcaatatcatccatatcggggaacaggtgctggagcagtgctgccggtttctttcaaagcatgtgctctcgaacggctcgcttggaatccgtacgatccatgtgaacatttcgatggtgcagtgtctgcgccagaatctgactgagaccatccggccggtgcttgagagttaccatattccgccgtccatgctgacgctggaggtgacggagcacacggcgattggcgccccggagcggatgctgtggcatatgcatgagctgggaaaaatgggagtgtcgtttgcgctcgacgattacggaagcggaaatgcgaactgttcctatctgatccgtttcccgttccaggagatcaagatcgacaaggagatcgtgtgggcgtcgttccgcgacaaggcggcgcgcatcgtgcttgaaaatgagattcacaccatcaaacagctggggattccgctgattatcgagggaatcgaagagcgggagcagagcgaagcgatggaacagcttggggtggaatgtattcagggatactattatggcagacctctgccggaacaggagtgcctgcggtatatccgcacgtttcaggagaaagcgcaaaacgacaggcagcaggcggctgtttcaggagaaacgcagaaggaagccggccggtgagagccatttgagtcatacagaaacaggaaagaaagagaagagacatgaatattattaacgcggagaatttaacgaaatcatacacagagaggaagcttttggacaaagcttccttttatctgcaggagggagaaaaagtcggggtaatcggtatcaacgggacgggaaagtccaccctgttaaaaatcattgcggggctggaggaaccggatgaaggccaggtgacctgcgccaaccatatcgtggtaagatacctgccgcagaatccggtgttcgatccggagatgacggtacttgacagtgtgctgacacagtgtgtcttaaattttgtcggcagcgggaggacagagcgcaccgatgcagacgcgcatgcacaagaacagaaatggagccttgagagcgatgcaaaaagcatgatgacgcgcctcggcattaccgattttacacagaaaaccggagaactttccggtggacagagaaaacgtctggcacttgtggcagcacttttagtgccgtgcgatgtgctgattttagacgagccgacgaaccatctggattcggcaatggcggactggctggaaaattatctgaaaaaatggcgcggtgcgctggtgatgatcacgcatgaccgctattttctggacagcgtctgcaaccgtattgtcgaggtggacaagggggcaatctacagctatgagacgaattattccggctatctggagcggaaggcggagcgggaggagagcgccgaggcgagtgagcgcaagcgtcagtctgtactgcggaaggaactggaatgggtcagacggggggcaaaagcgcgcacaaccaagcagaaggggcgcttgcagcgctatgaggaactcaagaatcagaaggcgccggagcgcgacagccaggtggagatgagttccgtctattccagaatgggaaaaaccacgatcgagttggatcacattaccaagggatatgacgggcggacgctgctacgggatttttcctatatttttctgaaaggggaccggatcggattcatcggggccaacggaagcggcaagacgaccctgatgaagatgattgcggggcgcatcaagccggatgcgggcacgatcacagttggggcaacgatcaagatcggctactatacgcaggagatcgagacgggccgcgaagcgggaatcgcctacatggacccggaggaaaaagtgattgattatatccgtaacacggcggagtatgtgcggacgaccgacggtctggtctcggcatcgaacatgcttgagcgttttttgttcccggcagcgcagcagtacagtccgatcggaaagctttccggcggtgagcggcgcagattaaatctgctgcgcgtgctgatggaggcgccgaatgtactgattttagacgagccgacgaacgatctggatacgcagacccttgcgattctggaagactacctggacagctatgagggaatcgtgattgtggtatcgcatgaccggtatttcctcgaccgcgtggtgcggcgtatttttgctttcgagggaaacggagagatccggcagtatgaaggcggttatacagattatgtcaaccgactggcggaggaaggcagaaagccgggcgaaacggcggaagttcagggaatgacagcacgcggagtctcggaggcggaaagcgcacaggaggccggcggtgtgaccgggacatccgggcaggatgcagcagagcaggcggattccagaaacacctggaaacgtgagaagaagctgaaattcagttataaggaacagagggaatacgagacgatcgaggatgacattgcgaacctggaagcaaaagtggagcagctggatgccgacatggcggaaaacgccacgaacccggtgaagcttggggaacttctggcggaaaaggaagcggcagaacaggcactggaggaaaagatggagcgctgggagtacctggaggagctggcggcgaagattgcggggcaggaatgaagaatataacgtttcattttacaaagccgtcttttttctttctattcgctgcagtgcgttaaaccagctctgcggcagaccgaagccaaagacaattcccagcacgatggcacctgccaccttgatggtttccatgccatagttggagaattgcgtcatatcgttcatgatgaaatagtaggacgtatagtaaatacctgctccgggaaccagcggaaaaataccggcgatcaggtaaatggtcaccggatttctgcggatcgcggacagaatacgcgaaaatacggtgagtgcgaaggtggcggtcagattcgcaagcaccgtgcccatatcgctgtttaagccgatcacatagacgacccagccgatggcaccggtcagaccgcagaaaaacagttcctttttcggcgcgccaaacagttccgcaaaagagagtgtggcaaacaaactcacaataaactggataatcataacagcgctgcacctccccttgcaaaatgatagatcgtaatgacggtgccgacaccgacagcgatacaaaatgcggtcaggatggcgtcaatcatgtgaatggcaccggacagataatctccgttaaaaaagtcgcggatcgacgtagtgagcgcgattccggggacgagcggcatgatgtctccgatgatgaccttatcgtagaggatgggggtaccaaaggagagtacaatcagcgacagcagcgttacgaatgcacttcccaggatattcgtgataaacttggaattcttatggcgctttaaggcaaacagaaatacctgcagcagcatgccgataaaaaagccgacgatgctgtccagggctgtacctccgaaaaggtaggaaaaacagccacaacctagtccgcagaagaagatgtggacgacaggtttaccgaacgaaatatttttacatctttccagacggttccaggcgtcgatcagcgaacattcgtgggaacagatctcgcgggaaagctggtttaatgcagcgatgcgcccgagatgcgtggtgccgagcggaatgtggcggatcatgctgcaggcatcttcacgatcctcgtttgcacttgcaaagattccgttggaaagcacataaacatcataattttcaatttcgtatgcctcaagaatatgcatgaccgtgtcctcgacgcggtagacttcggcaccattccgaagcagtgcatcgccgatttccacggcgagagccagaatttccttggttacagccatttggatgtccgcctttctgataataaaatgtccatatgaaaaagtaacacgtttttataaaaaaagcaatctggtacttttgtcagttgtcctgtacataatatctgtgaggacaggcataataatgcataaatcatgcaagtgatgtaaaaacggacaggaggacaggaatatgaattgcagaaaatacagagcatgccttgtgggagtgctgaccatcgcgctgatctgcggggcacttttatatctgaaatacgggagagagggggagaccccggtggacggcgtgctggtggaacggaattctacatgggaagcgggaactgcggcatgagtgcaaagagtgagacactgtatcttaagattgaccagaatacaatcgtgacagaccggcatgtgacgcttggggacattgcgaaaatggagtgcccggatgcttcgattgtgcgccagctgaagcagaaaaaaatctatacgtttgcggaggcgatgaatccgcgcaaacagaagaaccagatgaaggttttttccatattaaagatcgtcgaactgattcatgaggaatatccgaatgtggacatcagcaatgagggagagaaggattttatcattgaatacattcccaatcccgagaaaccgaagtggatcaatgcgttaaagaccgtcgcgctctgcgtggtcatttttttcggggcggcgttcacgattatggcgttcaacaacgatgtatccgtgggagatgtcttttccaaattctatcggcaggtgatgggaaaggagtcaagcggcgtgacagaacttgaaatctgttacagcatcggacttgccattggcattacgctgtttttcaatcatgtgggcagtaagaagatcacgccggatccgacgccgatgcaggtggagatgcgcaaatatgagaaggacatagatactacgttcatagagaacgcggagagaaagggacacagcatcgatgttaattgagcatatatttttgggcttctgcgggcttgccgcgggacttgccgtctctgcgggaacatttgcgtttttgatcgtcatcggtgtcattccgcgcatgattggaaagtgcaaccgcgcggcagagacactgcattttgaaaatgccgtgattctgggcggaatctgtggaaatctggcgtctgtttttttgcagatccggattccgttcggaccggcgcttctgtgcgtgtacggtatttctgccgggatatttgtgggaagcatcgtggtggcgctcgcggagatcctgaatacatttccgattacattccggcgcatgggcttaaaggtcggactcttctgggtcatgcttgcgatggcggcaggaaaagtggcaggatcgctgtactatttccttggaaattttaaggcacagtagtacaatgatgggagattgtttttttacggaggaaaattatggtgccatccatcgcacgccagagcgtgattatcaagtgcaatatgcagaagtcaattctgacaggaaattatgaattttattatgctgcgggacttatcgccaacctttccggagttgagatcccggaggacatcaagccggaggaactgctcgcgcttctgtcggagaagataccgacgctgacaccagcggatgagaaggaaaagtatctgttcgggatggtggcggactaccgtcccgaagatgtatatgatgagcagatgcgggaacttttagactggggacgcactgaaaaatatctctggacggtcacattgccggatgactggcagaacgcataaagcccggggcatcatagcaagcttgtgcatcatagcaagcctgggcatcacagcattacagagggaaaatggcgggagaagcggtcggaggaatagaaataaataaaatgcgcatactgacaaaaaagacggaggttgcgcagtggataaggaaaaagaacgtttacaaaaaaaatacaatgattatgtgaagcaggtgactcccacccataatctctggtggaatatggcgaaggcgtttgtgacaggcgggatcatctgctgcatcggacagtttattctgaacgtgtgtgtgaattacggactggatcagaagacatccggaagttggtgctctatgttgctcattctgctgtctgtactgctcaccggtctgaatctgtacccttcgattgcaaactgggggggcgcgggcgcgctggtgccaattaccgggtttgcaaacggtgtggccgcgcccgccatagagtttcagaaagagggccaggtcttcggaattggctgcaagatctttacgattgccggaccggtcattttatacggaatattttcaagctgggtgctcggattgatctattgggtattaaaatggtggggaatggtgtagtgccttttccgtgcgggtctggaagaggaaaaacattctcccagacccgaaatattgtgattttcgggtctgagagaggaaaaacgccgttccagacccgagaagtggacgaaaagaaggaaaaagaagagaaaaaagaagccacccgggtctggaagaggaaaaacattctcccagacccgaaatattgtgattttcgggtctgagagaggaaaaacaccgttccagacccgcgccgggcgaaattaaaagaaacggcagtggaagagagaagcacggattcagaccgcggaatccagaaaatagtaggaaatcagatgctcaatcatgccggcgtttaagggatatgctttggtctcgtacgtggtgatcagatgaacggatggaatgatgccgtttgcagcatagagagaaagcttcgagccggcgttttttgcgtaggcgggatcgtccatcagaccaaaatgctcccagtagtagagtgcgccggttccgggatgacgtatggtgaaatccggaaacagagtgatgccgccaagggagagcgcacattcgtagcggtaaggaatggcgtttaggtggagcagcatggcaatcatggcttctgatttggaacgcaccctctcgccggagacggttttgtgaagcagctgctcgggatggagcggattgcgttcgtaggaagcggcagaccattcgacagcggaacgagtcgaaatatccgagatatctgaaacattcgagacgtccggaatattttttgaggtggaaaaataagaatgaagcagattttcacaggcgggatcagagagaagatgtggatcatcggaagagaggctgcccgcgggggagtattttaaataggcagtgattgctgcctgctcctgcaagagtatttgctcctgttgctgcagatactttttcagcgccagctgttcggcgagagcgcggtttgctttcggaatataggtcttggagtgaccgtcgccctgataccatttgacagtggttccgttgcgggagcagataagttttccgggaggaagcttctgaagctggttctggatggtacgaagttcctgcccgttgcggtcgcgggcagtgaggatttgtgtgtgtaaaggtgtcatggtattctcctgttctatagatggtgtgtgttaagaggatccggtatacttttatgtgctaaaaatgcccgctgctgttttaagtgcaggtggaaaaggagcgttggcatataatgagaaaagattatgaatttggtatcgctggggtgatctgggtgaaaagtgtctgcaatcgaatgaacaaattcatggaagaacatagagtaaaatggttatgatataatgaatcttgacagattcatattgtgcgcagaaaacaacgcaaaaagatgttatactggtttttattaaaccatactacaaaagaaaagtaaagcgaacaaccgaaaaagataccatctcatatcaatcagggaaacagtgcattccgccgccctgcagcccatggcttgacatgcggttcactccggttgtaagataagaaacaatgagtacgaaaaagaactgtggggaaaagtaaatgtcagttacaaaacaatttgtcaggtatgtcacacagaatatattcggaatgttaggtatctcctgttatatcatcgctgataccttttttattgcgaaggcggcgggaacggacggaatcacggtcttaaatctggtgcttccgatctacaatctgatttttgcgatcggttcgatgatcggcgtcggttctgcgacgcgctttacgatcttaagggcgcagggcgaggagcgggcgcacggctatttttccaatgccatctgctttgtgtggatgattggaattttgtttacacttgcgggcgtttttatcccggataaaatcatcgcgctgatgggcggcgatgcgggaattgtggcgcttggaaccgggtatacgaggatttttctgttgtttacgccgtttttcatgatgaactacgtcatcatggcatttgtgcgcaacgataaccagccgtccttagcgatggcaggaaccctcgcgggaagtttttccaacatcctgtttgactatatttttatgtttccgctcggcatggggttagagggagcggcgctcgctacggcggcatcaccgatcatcagcattctgatctgcagcgcgcatttctttggaaaaaagaatactgtgcggttccggctgcacgcgccgtccatcgcccagttattcggggcgtgtcagcttggcgtcccggcatttgtgggggagatttcttccggagtcatcacgaccgtgttcaatttcctgattctcggtcttgtgggaaatatcggtgtggcggcttacggagtgatcgcgaactttgcgcttgtggcaatggcaatctttaatggagtgtcacagggagcgcagccgatcgtgagtgactgctacggaaaaggagatgtgaaatctgtccggaaaatacgaaatctcggacttgtcacggctttgggcatcgcggtagtgctcgtcggagccgtctatggatttacggattctctggtaagcctgtttaacagtgaacattctgcggaactggcagagtatgctcacacgggaatgcgtctttacttcatcggcttcctgtttgccggaatcaatattgtgggggcgggatttttaagcgcgacagaacgtgcgcgggaatcgtttgtgacatcgatcatgagaggatttgtctgcattatcggctgctcgctactttttgccgcagtatttggcatcaatggcgtgtggctgtcgttcccggcatccgagcttctcacagccatcgtgatggctgtggtgctcgtgcgggataaccgcagactttagataaaaccgaaatgttccagcgcaaggcggatgccgtcttcgctggcacattttgttacataggacaccttgtcaaaaagcgtggcaggagaggcgttgcccatggcgacactgtttgtcaaagcagtgagcatgggaaggtcgttgttgctgtcgccgaaggcataggcgtcctttttgtctatccggtaataatcaagcacatagttaagaccggtggctttggagtagccgagcggaacgaattcgcggaaattgccgccccggtcaatgcactcaaaatagcggtcacttgtggtacggaaaccggcaagctgctcggggtgctcaaaccataggacaaacttatcacagaaaaaattaggattctcaaggtgctccggcatctcatagccgcgttcttcaaacgcctcatactgccgtctggcatccgggtgccggagcggtcttgccagatcaaaagcaacctctttcctggattcaaacaggatatcgatatcccactccctggctgcgagaagcagcttcattacagtctcgtgcgtctgtgcgacatgaaggatttcggcaccgtcgcagtagatatctgtgccgcagccgcagacaaagccgtcaaaacccacatcacggaaacgctgttccacattttgaaaacagcgcccggtattgatgaacatcagattcccgtttgcccgcgccgcccgtatggcgtagacggcactttccggaatcgaaccgtcaatctcggaagtcagtgttccgtcgatatcaaaaaaagcaattttcttcatgaataatctccaatgtaacagatctatagaaacggaagtattgtaatactttttacctaatctgtcaaaggaggcgccatgtccgccccgaaacacagatatttaacggttccgtcacataaccgtcacattacattcagctgccctttagaaagcgatgctatccttaccgtgaaacatgagagaggatgaaatgccggaagggaaaggatgaaacaatgaaaatgacgtgggtacacaaactcctgggaaaacattccaaaaaattttacggaatacttgccgggattctgactgccgcagttgcgggaagcggagtcggctatcatgtgatagcggcttcgggcacagcggatcagacggaggaggacacacagatagatgagacagacgaagacggcagcttttccgggacaggaaccacacaggtgaaaacagagagccagcttcctgatttttctgtgaatgcggtgaccatgacggtggaagaagtctacgtggaagcgggaagcactgtggcggagggcgacgccttattcaagatcgacgacgagagcatggcggatgcaaaagcgtactacgaggatgccatttcggatgcgaaaactgcactgcaatccgcacagatcaattttgagagcggcgtgctggaggcggaaagcgagctttcctccacaaaacttgcagcggacaccgcgcaggatacttatgatgcggcagtcagcgagctgtcggtaaagaccagcgaggcgcaggaagcgtacgatgaggcggtggaggagatctccgattatcaggatgccatcgacaacggcacctactacacacaggtcgggatcaatgaaaaacaggcggcagtcgatacggcgcaggcgacgctcacggaaaagcagacgcagctttccaatgcacagagcagcagccaggcggcaaaagagacatacgccgcggatatggcgaatctgaaaacacagattgaagccggagcgtcctacacggatcttgcggcgctggcagatcagctggctgcggattataccgccgtgcaggaggcagccgacgccctgtcgcagagccagacagaggcggagagcgcaaacagtgcactgcagctagccaatcagacattccagaaagcggttgaggaatataacacgaaggtgacagaggcaaatgagaaaattgcggagctgacagatgagctggagaaactgagtgacgcctgcgacgaggcggagcgcaatgagacgacagcgcagccggcgcttttgcagcagtatgaagaggcggttctggagggaaaatatgcagataccgagtatgaagcttcgctggaaaccttgcagagtgctgtggacgaagcgcaggatacattggatgagctgaaggaacagcagagcgcactcttagcgatcgaggacggcgttgtatgtgcggaccgtgacggaacgcttgcatcggtgacttacgaggcgggagataccctgattaaaaataccgcatttgcaagctattacgatctggatacgattctgatttctgtggaggtatcacagaacgatattgcaaaacttgcggtcggcgacaccgtgcaggtacagatcagtggaagcagaatgggagcaatcgacggaaccgtctattccatcgcatcggaaaaaacatccggcggaagcatgtccaatgtgacgtatgcggtcattgttgccgtggacaatacagatggcacacttactactggcgtacaggcaacggtgaagtttgaaacacaggcgactggagccacagaaatggaagagactaagaccgcaggaaaaaccgagacgatcggagcgtctgagacagaggaagcaggaggaaagacagaatgaagaagaaaaagctttggctggtgaccggagtggctgcggcggcagtgcttgccgcaggaaccgtcacctttgcatatcagtcgggaagtgacagtgaagagcagaccgtatataaggaagtaaccgtggagaaaggaaatctgacggcgggcgtgacggagagcggcagtgtaacgatcggcacgctggatcagactcttgatttttcagaggattcttcctctgcaagcacgcagaacaactcgtccgcgcagaacagtgcgggaggaaatgcgacttcgtccaccagcacggcatcgacccttgaggtggaaatggtctacgttaccgcagggcagtcggtcgaggagggagatcccatcttaaagctcacggaggagagcgtggcatcctacaaaaaagatcttgaggaagcggtgacggaggcgaagacagccgtcagcgaggcgggcttaagtgcagaaaagcaaaaagtatcggcaagttactcctacaatctgagcacggcggagggatctgttgcacaggagacctacgaagctgccataaagcagctgcaggaggctgtggatgacgcgcaggaagcggtggatacgtcggcgtccctgatcaattactatcaggagcagatcgatgcgggcgtggacttaagcgcatcgcttaccgaggagcaggaaaattacgacaaactgtacacaaagcttgtggcagcgaaaaacaactataccacgaagtccattgaggcggagaaaacgttgaaagaagcagaactctcggcaaaaaatgcatccagtcagtacagtgtggatgtctccggggcggacaatgacattaccgatgcaaaagatacgctgtccgacgcggaggaggcacttgaggaatttgagacagccatcggggatgacggtacgatctatgcggagtatacgggaaccattaccgatctggagtacgaggaaggggataccatctcttccggcgcaacggttgccactttttccaatacggatgcggtgacgatcaccgtctccgtgtcggaggaggacatcacgaatattgcagtcggagatgtcgtggagatcgagctgtctgcctatgaggatcagacgtttgcgggggaggtggagagcattgacacttcatcttccagcggttcctccacggtgtcttacaatgtgactgccgcgtttaccggggacatcactggaatatacacggacatgacaggaaacgtcacatttatcagcaggcaggtgacggatgtgctatatgtatccaacaaggcggtccagtcggacggaacgacatcctatgtcaaggtgaaggatgcggacggaacgatccgcatggtggatgtggagacgggattttctgacggggtcaacgtggaaatcacgtccgggctcacggaaggtgaaactgtgctgatagaaagtcaggtgacagaatgaagccaaaagaattattgagactggtctggatcaatatcacacagaacaaatttaaggtgatcatgacctcgatcggcattatcgttggtgcggccaccatcgtgatggtcattgccattggtaaaggcggtcaggcggacgtggcagaccagtttaaaaacttaaatgccggtgcggtggacatttcctatgacggcgggacagattttggcggcggaggaagcagcgatgattcggattccgacatggcaatgatggcgccgggtggcggcggaggctttggcggcggttttggcggagcaccctccggcgatatgggaggcggttccttatcgggaggcgaggcgccgggcggatcaccggggggagagatgccttccggtgacggcggcggtatgccggatatgggaagctttttcggcggacagagcgatatggaagaccgcatgaatcaggaaaatatcacgctgagcgaggatgatgtggatgacatcgaaacatttgcgtccggcatctcggcagcgaccatttcctacaccacaaaatccagtgtggatggcggagatctcgatgaagccgatacctataccatcgcaggagtgaaaagtaactacgagacgatcagtaacctctccctcgcggtcggaagctttatcaccgacgatgatgatgagaacaaagaaaaagtctgcgtgctcggcgcaagcgttgccgaagagattttcggcagtgccattgaggcatacggaagcgtgatctatatcgacgaccggctttatgtggtaaacggtgtgctggaaagcatgggaacggtcgcgtccggtatcagcccggatgattccatttttatcccttatgcgaccggtgtgaaatatctggtcggatcatcggtcagcccgacgatcacggtgctggcggcagatgtgaataatgtagaaggcgtgatcgaggaagtgacagaagtgcttgccaccagttacccgaacgctgagttcacatttgaggatgcaggaagcaagatggaggcggcggaggcttccaaccagattctgacgatgcttctcattgcgatggcggcgatcgtcttcgtggtcggtggaatcggcattatgaacgtattgtttgtatctgtaaaagagcggaccaatgagatcggtatcttaaaagcgatcggctgttccaagcgggacattctgctggagttcctcgcggaggcggcggcaatcagtctcatcggtggtgtgctggggaatctggcatcgctggctgtggcgccgattgtacagtacctcggcgtccgtgtggaactgtcggcgttagcatttttgattgcgcttgtgtttgcggtgggaacaggaacgatcttcggattttatccggcttataaggcgtccaatctggttccagtggaggcacttggcgcagaataaataattgaaaagaggtttggcatgataaagaagaaagcggtggcgggcggcattgtggcgcttgcagcagtgctcggcggcggaggcattttcgcatggacccgcaggacggcagacacggagacactggcggataatcagaaatatgtgtatgcctatgtgaccagcatcgagggaaatgaattgacatatatggaagtcgatgaatcggtggtggaggcatatcttgcaagcagcacggaagacaccgagaatacagaaaaaggcggagatggctcaggagcgccaggaggaagtgatggttcaggggcgccgggaggaagtgataccgcaggagcgccaggggatagcacggaggcgtctggagatggcacgggggcgccaggagatggctcaggagcgccaggggatagcacggaggcgtctggagatggctcgggggcgcctggcaggatgtcgcagggaacttccggaacggatgctaacacagagacgtcagacggacagccgcaggaagaaaatggcgacatgccgggcgatgcaacatcggacggaacaggaagtaacggtggaggagcaccgggcggaaatggcggcatgagtggtaaaagtgtgacaacattgattccggtcagcacggtggtgcacaccacggcaggtaccgagacgacgtttcagcggctggcggctggcgatctgctgaagcttctgatagagaccagcgaagacggtgaggaggttattatagagatatggatgcagtgatggatatggagccggcgatctgcgcggtcacaaaagcagaaagtatagaaaatacagacgtaatcacaatgagaaatatcaacaaatcataccgcatgggaacgcagtccctccatgtgctcaaagatgtgtcgctgaccgtaaagcagggagaatatcttgccattttgggtccttccggttccggaaaaagtacgctcatgaatatcatcgggtgcatggatgtgatggacagcggaaactatctgctggatggcgtggcaatcgaacaggcgaaggaaaaggaactggtaaaaatccggaatcagaaaataggtttcatttttcagaaatatcatctgattccgacctacaacgtgctgcagaatatcgttatgccgcttctgatgcgcggaatggggcttgcggaagcgcaggagacgagtatggatacgattgacatgctcgggctctcacagcgtatcggacataagcccaatgaactttccggcggacagcagcagcgtgtagccattgcgcgtgcactggtcggaaaaccggctattctacttgcagatgagccgacaggcgcgctcgatgtgaacagtggaaaagaggtattgaagctttttgaaaatctgaatcagatgggaaataccattgtgatgattacccatgatctgaatgtggcaaaacatgcgggtcgtgtggtaagaattgtggacggcgagatctatgaaaactgattccagagcggttgcagtaggaaaatgaggttataaaaaactgattttgggaggatgcagcagaaaatgaggttataaaaactgcattttgggtcgtggcgggtctgggagatacattttgccatctgagacccgttcttgactatttcgcgggtctgagagctgcttttttgcggctgagacccgttctactcttttatactgttgttatgtcaactattctgtcattttgcgggtctgagagcacgtttttgcgtgcatagacccgaatccacggtttgtaacataatgttcgcggagacaaaagtgagcatgaagcaaagacggatgcgcatgcttacgtgcagcggacggatatgttccatgcgaacgcgcttgcatggaattgccgcaataagcatattgcgccctgctttgataagtaatattattagaaatccccaagtgtgtttgtaataatattacacatcacccagaagaggtctaggcttattgcgataattccttttgccggggtatcgttgatgtatgatataatgaatcttgacagattcatattgtgcgcagaaaacagcgcagacacagaatcgcatttacagtaattcattgacagtgcaaagagaggaaagaatgacaaacgaacagatacgtgattttttagagaaacatgcggaaaagcagttcaaagattttaccagcagcctgattccggggacagattcgattctgggagtgcggcttccggtgctgcgctcgctggcgaagcagctcgcaaaggaagactggagaacttatctcaaggaggcacgtgatgacacctacgaggagattatgctgcagggacttgtgattggctacgtgaaagcggagatggaggagcttttggaatatgccgcagcatttattccgaaaatccacgactggtcagtcaatgatgggttttgttctacatttaagattgtccgaaagcaccgggcagaggtgtgggattttctgatgcaataccgcgcgtctgagagtgaatttgagcagcgggtggtggcagtgatgctgatggatcattttctggtgcctgaatatatcggccgtgtgcttgccgtatataacagcctaaagcatgagggctattattgcaaaatgggagtcgcatggggaattgcgactgcttatgcaaaatttccgcaggagacccaggcatttctgctggaaaatgaactggatgattatacctataataaggcaattcagaaaatgctggagtcatatcgtgtaagtgcggaagacaaagaaatgttgcgtggtatgaagcggaaagtgaccggtagaaagaacgtcgccaagcccgagcagtaggggaactaaaaaaccgagtcatctgccagaaatgtgaagcctccggtgctccgaagcatccagccgtcggaaagccccgccaggctcaagcagaacgtgccataaaaccaagctgtttcccaagggtgtgaagcctccggtgctccgaatcacaccgtcgtcagaaagccccgccggactcgagcagtaagagtcctaaaaacaaagtcacctgctttagatgtgaagcccctggaatccaccccaacctgccacgccggaacatgggaacggcatatcagaacacgatgcgaaaatctcttatgaaaatgtgcagaatagaaacggaaagaattgcaacgccggttgtgcatatgttatacttaacatatgcagaaacgacgccggatttggggtatgatagtaacggcgggcaaaggctgtaaaaaatggttgccacaggaagtggcggattggaggagcatatggcaaggtttacgttaccgcgcgatctgtatcacggaaagggagcgctggaggctttaaaggactttgagggaaagcgcgcgatgatctgtgtcggcggaggttccatgaagcgttttggatttctggatcgcgcaaagcagtatctggaagaagcaggaatggaagtctgtctgtttgagggaattgagcctgatccatcggtggagacggtgatgaaaggtgccaaggcaatggaagaatttaagccggactggatcgtggcgatgggcggcggctctccgattgatgcggcaaaagcaatgtggatcaagtatgaatatccggatattacgtttgaagatatgtgcaaggtattcggaattccgaagctccgcaaaaaagcacatttctgcgcgatctcttccacatccggaacggcgacggaggtgaccgcattttccattatcacggattacgaaaaaggaatcaaatatccgattgcagattttgagattactccggatgtggcgatcgtggacccggagcttgcagagacaatgccgcagaagctggtggcacataccggtatggatgcgatgacgcatgccatcgaggcgtatgtttccacggcgaactgtgattttaccgatccgcttgccctgcatgcgatcaagatgatccagagagatcttgtgggctcttataacggagacatggaaaaacgtgattccatgcacaatgcacagtgtctggcgggtatggcattttccaatgcactgcttggaatcgttcattcgatggctcacaagacgggtgctgcatttgcagattacggcgcacatatcattcacggtgcagcaaacgccatgtatctgccgaaggtcatcgcattcaacgccaaggatgagactgcgaaaaagcgctacggcgagatcgcagattttatgggactgggcggagatacgctggatgaaaaagtggcgctcctcattacatatctgcgcggcatgaatgatgatcttaagattccgcactgtatcaagaattacggcgcggacagctatccgaccgagcagggatttgtgccggaggaagtattcttagagagactgccggagattgcagcaaatgcaattctggatgcctgcacgggatcgaatccgcgtcagccgagccaggaggagatggaaaaactgttgaagtgctgctactacgatacagaggtagatttctagaagagcatatttttaagacagctgaaacatcatccataatttgataaaatacagcgcgatcgatgacaataacagtacggtcaacgatcacagaggtcagtgataacacaaccaatggtcatacgataaaacagagggtgcacatgcgtgccggaaatccggcactcgcatgcaccctctgtttttgtctgccggcgaaatttcgtttttgactagcagtccaatcatttcaagatcatgcgaaacatttctgaacagtcaaaccagtttcacgcccagccgccccaatttctgggcagcgggaaattttccgaaataacgaaccatattcccaacagaaaaagtcgaactgcagtcggaaaatttgtgaacagaaggaaacgaaaatgatattttaccggtataatacacgtttgtgcgccgcatactaaggaaaagtcttgcgaaaggaagcagtgatatggagatacaggtcgggaagcagagcctcgcgtttgcggaggctccttacatcataagcagtgcgagtattgtggggaaaaaagagggcgaaggaccgctcgggaaccgcttcgacgtggtgggcgaggacgacaagttcggacagaacacctgggaggaggcggagagtaccctgcagaaggaagcatttacgctggcggtcggaaaagcaggcttgaaaaccgaggacatccgttatctgttttcgggggatctgctcgggcagaacattgcgacatccttcgggctcatggactatcaggtgccgctgctcggactttatggagcgtgcagcacctgtggcgaagcgctctcattgggcgcgatgtgcgtggcggcggggtatgcggattatgttgtggcgatgacgtcgagccattttgccagcgcggaaaagcagttccgttttccactggaatatgccaaccagcgcccgaaatcggcgacgtggacggtcacgggaagtggcgcctatgtgctcgggaaaaaaagaagcaaggcgcgcatcacggggatcacgaccggcaagatcgtcgattacggcatcaaggattcgatgaatatgggagcggctatggcgcctgccgccagtgacgtgatctgccgccatctgtcggatttcggaaggaacgtgacggattacgataagattattaccggcgatctcggaaaagtcgggcaggaaattctctgggatctgacgaggactggagggtatgacatcagcagcatccacaccgactgcgggattgagatctacgatgcagacaaacagggaacgggcgccggcggttccggctgcgggtgtgcggcagtgacgctctcggcacattttatgcggcagatcgaggaagggaaatggaaaagaatcctgtttgtcccgacgggagcgctgctctccaccgtttcctttaatgagggaatgacggtgccgggaattgcgcatgcggtcgtcatcgagcatgcgggatagaaagggggaaaatgctatggattatgtcaatgcattctgggttggcgggctgatctgcgcgctggtgcagattttaatggaaaaaacaaaaatgcttccggggcgcatcatggtgcttctggtgtgtcttggcacactgcttggagcgatacagatctatgaaccgtttgtggaatttgcgggggcaggtgccagcgtgccgttgctcggatttggaaatgtattgtggaagggcgtgaaagaggcggtggatcaatatggctttcttggaattttcatgggaggctttcaggcaagcgcggtgggcatatcggcggcgttggtgtttggctatctggcaagcctgattttccagccgaaaatgaagaaataagtgtttgcgtattggtacatctggtagtagaatcttaatcataaaaagcgtgatagggggagactgccatggatgagaacgcactgcgcgcggccggaatcgattatgatgccgcattggcacggtttatgggaaagcaggcgatttatgaaaaatatctgcaaaagctgccggaggatgcacatatggatgcggcgtgggcggcattggagcagcaggatgaagcggagctgttggagcaggtgcatgccataaaaggactgaccggaacgctggggattacgggactttttgagcagagcgcggcgattgttgcgctcttacgtgcaggaacgcgcgaaggactgcaggagaaaatgacgtcattaaaacaggagtgggaccgcgtctgtgagacaatccgacaggcgtaatccgcctgcggattgccggctctaaaagattctagtgaaacggacagaaatagtccggatgcctggagatgatctcggtgcttgcattgaagccgtcgtagatgtgatgggaaactacatccgagagcccctcataatcccgcgaggagatacacgaccagattttgatatggtcgttgtacagccgcagtagattgtcgcggtcgcccagattcaaaaaggtgcggaagcgctcgtactgggagctcactccggtcagaaaatccatgacggtacgtttcccggcgagctcgtagagcgttgtgtggaactcgttgtcgttaatgatgaaggcccggccgagttcctcggcgggcagatcctgttccagaagttcgcattgacgctgcaacagcaggcggatgcggaattcctgggatttgtcgtaccctgcggtcagatctcttaacaccgcctgctctaaggtctccctcagatagagaatgtcggagatcatgttgaggtcgatcagggagacgaatgtaccgatgtgcgggcggacctccagaagcccctcgcgctcaagcattttaaaagcatcccgcaccggggtgcgcgatacatggaatgcggcggccgtgtcgatctcgctgatggcagatcccggcggaagctccagatgaagaatctgttcttttaaatctttataaacggcaacggatgtgccggtatgtctggttccgttcataacatgctcctctgtggacaatttggtgtccattcttaccattcaaaatgtgaacatatttctaatataaatcccaatggaacaaattacaatctatttttccggagcccgggacatgcaccttacatatgtatacataggatcgggaaaaaacgggaacgctgtttcttggggcaggatgaaaaacagtgcaggacagtagacggaattctggcggatttcgataaaaagtccttccggaacttaagacgcgcggaacacggcgcaagaagatgaaacaaggaaaatctgccggggaatacccacttgtatacaacaagaaaaaaagcagagtctgcggaaacatcgacgtaaattgtgaataatagacaaaacggatacaaaaaactatacaaaacagaaaaaaagaaagatggatgttgacgcttgtatacaagcatgatatagtcaagaaaaagaaacaaagaaacgtacatggagcaatatcatagcatgtatacaagtaaatatcacatgcgcggaaacaagcttccgcagaatggaggaaactatgaaattatcatttcgctggtatggaccagatgacaaggtgacactggagaacatccgtcagatcccgggaatgcactcgatcgtaacggctgtgtatgacgttccggtcggagaggtgtggagcgaggagagcatcgcagcactgaaaaagcaggtggaggatgccggacttcattttgaggttatcgagagtattccggtacatgaggacatcaagcttggcaagccgagccgcgaccgctacatcgagaactactgcgagaacatcagacgtgtggcaaaagccggagtgaagtgcatctgctacaatttcatgccggtatttgactggacgagaacacagcttgaccacgtgctgccggacggttcgacctccctggtatattatcaggagcaggtggatgctgtgaatccgctgcagagtgacagcgatctgacacttccgggctgggatgcaagctacaccagagaagagttaaagcaggtggttgcagagtacaacgcaatgtctgaggatgatctttggaacaatctgaagtatttcctggagagagtgattccggttgcagcggagtgcgacgtcaacatggcaatccacgaggacgatccgtgctggagcattttcggacttccgcgcatcatcacctgcgagaaaaacattgatcgtttcctcggtcttgtggatgatccgcacaacggcatcacactgtgcaccggctccctcggctgctcgaacaagaacgatgtggtgaagatggcggcaaaatatgcggcaatgggaagaattcattttgcacatctgcgcaacgttgcagtgcttgagaatggttttgaggagcgtgcacatctctccagctgtggctctctggatatgtatgcgattgtgaaagcgctgcatgacaatggatttaccggatatgtgagaccggatcacggaagaatgatctggggagagaccggaagaccgggctacggactctatgaccgtgcgcttggagcaacctatatcaacggattatttgaggctgtggagaaggcttcaaaggaaaaataaatatcagaaaaatagaaatcaggaggaagacgaacatgaagttaccatttcagattgatctgacaggcaaggtggttgttgtgacaggtgcgggtggagtcatctgctccgtgcttgcggaggcaatggcaatgaccggcgcaaaggtagcgctgctcgacttaaatgaggatgcggcaaaaaagcatgcggatgacattacggcaaagggctatattgcaaagggatacaagtgcaacgtgcttgagaaagcgagcgtacaggcggcgagagaccagatcgctgcggacttcggaacctgcgatatcttaatcaacggtgccggcggcaacaacccgaaagcgacgaccgacgacgagtattttgtgccggaggatctcggacagatgaagacattctttgacctggatgcggacggtgtctcttttgtattcagcttgaacttcatgggtaccctgattccgacacaggtatttgcgcttgatatggtcaacaaaaaaggtgcgagcatcatcaatatttcctcgatgaacgcttacacaccgttgacgaagattccggcatactccggtgcaaaagctgcaatttccaactttaccgaatggcttgcagtgcatttttccaaggtgggtatccgctgcaatgcgatcgcaccgggatttttctccacacagcagaatgcaaagcttctgttcaatgaggatgggacaccgacagccagaaccggcaagattttaaacaatacgccgatggatcgttttggtgaggtggaggaactgatcggttccgtcctgttcctggcatgtgaggaggcaagcggatttgtcaatggcgcatgtattccgatcgacggagcatttgcggcatactccggcgtataaaagcttgcaaaggagccggaagaggcggcaatacatgaggtggaacaatggggtattttgattttcagaaaaaaagtgattgtatcgtgtgcattgacagcgacggctgtgcgatggacacgatggaggtaaagcacagaacctgcttcggaccgcagtggatcaaaacattcggactgacggagcatgaagcggagtgcatggagctttggctttctatcaacctctactccatcacgcgcggtatcaaccggtttaagggactggcgctggcgctcgcggaggtggagaagagaggtctcggtaacatcgagggacttgcggagtatgaggcatggacaaaagaggcgaaggagctctccaacccggcgctgcttgcggtgacgcagaagagtgataacccgtgttttgaaaaagcgctgctctggagcatccgcaccaaccgcgcgatccatgcgcttccggcagaggaccggccgtttccgaatgtgaagtctgcgatggatgcgatggcaaaacaggcggatctggcggcggtgtcgtccgcgaaccgggaggcggtcgaggcggaatggggcagacatcatcttgccgaagactgcagtacgcttctgacgcaggaggcgggaaccaaggctttctgcatcggtgaattgagaaaaatggggtatgagcccgggcggattctgatggtcggcgatgcaccgggagaccgggacgcggcagagaaaaacggcgtccggttctatccgattctggtcggacatgagggggagagctggaaacgtcttttagaggaagcgtttccaaaacttcttgcgggaagctttgatgcggaatatcaaaaggaactgaatcaggcattcgagcggaatctcggtgttcatgccgattcggagtgagaaagagagggatattttaatatggtagatatgaaggcaaaaccgttttacctgtccgatgaggactgtaaatgggtggaagagaccatcgcgggtatgacgaccgaggagaagatcggtcagctttttttcaatatgggatcctccagagacgaagagtatctgaagatgacagtggacaagtaccacatcggcggtatccgctacaacccggcaaccggtgccgaggtgcgtgagcagaaccggattcttcaggagaacagcaagattccgcttatcattgcgtgcaacacggagaatggcggcaacggcgcctgcactgacggaaccatgatcggccagcagaccaagatcggtgcgacaagagacgccagatacgcgtacgagctcggccgtatgtccaacaaagaggcggcggcgatcgggtgtaatctctcctttgccccggtcagcgacatcctctacaactgggagaacccggtcatcggactgcgcacctatggaaacgatgtggaccgcgtgtgcgagatgacgaaggcatatatggacggcgcacacaccaatgagggattctgctgtgctgcgaagcattttccgggcgacggactggacttccgcgaccagcacgtggcagacagcgtcaatgacatgagctgtgaggagtgggatgcaagctatggaaaagtataccagaacctcattgacaacggtctggaagccatcatggcaggacacattatgcagcctgcgtacaccagacattttaacccgggaatcaaggatgaggacatcatgccggcaaccctttcgccggagctgatcgagggacttctgcgcggaaagcttggttttaatggtatggtgctgaccgatgcttcccacatggtcggactgacctgctgtatgaagcgcagcgagatgcttccgcacacgattgcagccggtgtcgatatgttcctttttttcaatgagatggatgaggattttgcaagcatgatggcgggctatgagaacggcatcatcaccgaggagcgtttaaatgacgccctgcaccgcattcttgctctgaaagcacacatgggactgcacaaaaaagcgaaaaatgagatcgttcctccggtggaggtgatggagcaggtcgttggctgcgaagagcacaaggcgatggcaagagaaatctccgagaaaggaatcactctcgtaaaatacaaggacgaggatgtgcttccgatgatcccgagccgttacaagcgcatcatgatcgtctccgtcagcggattatccgcgggcgtgatgggaaccatgatggcaaaatatatgggcggcggcaagaagagcccggcagagcgtctgcgtgacaagctgatcgagaagggctttgacgcatttatctacgagagcccgctcgacgcacttgcaaagcgtgcagcagcaggagaaaaagtggacatcaatatgtactttgccggaaagacgccgatcaaggatttcgtcgaaaatcaggatctgatcatcacactggtggacattgcaggcggtttccagccggtggcaagaccgggcttcggcatgagcaagggcggcggagagatcccgtggtatgttcatgaacttccggttatcgtgatcggatgcggacagccgttcgtactggcagacattccgcaggcgagaacgtatatcaacacttacgacagcgcggatcagacgtttgatgcgctcatcgagaagctgatgagcggcagcgacgcatttatcggggaggacccggtggatgcctactgcggactgtgggatacgcaccggtaggggcttacgcaaaaggatcaggatatacaggcacttgggtcgtaatgacccgggtgccttttttagaggtaatttgattgagcatatggatatgaagtgctatactaacagtgataagaagagaaggctgttcttcatattgtcataaaggagagcttgcttatgatggcggatgaaaaaattaaaaattccagtgaactcgagtttgttgtattttgtatcgaaaatgtagcggcaaaactggggatggatgcagagcgtgtgtatcaggcgtttgccgaaaaaagtgatattctaagtggttatattgtgccggaatatgaagtgctgcatacacagagccgggaatatatcgtagatgatcttattgatgtgatgaaagaaaggggcgtggaagtatgattctctaccatggttcttttggaaaagacgcgacagattatgatctcgttgttggcggtgttgccaatgataaggtattcaatacggtggaattgttttttgatggatggattgataaagcggaggctatcaaacgtcttcgttatgaaaaaccgaatgtgcaaatttgtttccgcacagagagagcactgtctctcctgcattttgaagggagtgaaattgtatgacagcaaatccgattttacttcaaaaaaatatagccgtgtcattgcgtgttttgcaaaacggcagggaatttcactggatgtggcattggagttcttttatcattccgaggtatatcaactgatccgtgatggcgtatcggatatgcactgtatgagcgatgcgtatctggcagaagaactggagcaggaatacgccggtaaaatgccggatgccaagggtggcattttttgatatgtttttacaaaaggcaatttgtatgagtttttatttatagacctaatatcgtgaaacaaccatagcttttaaaaacttcttttgcccatttatttgcttcttcgtatacctcttttgaaatattatcttttgaagatatgagagttcctatttttatccattcatcagccgtaatttctgtctctccgaaaggatcatatttaggaacacatactacgagtgcagctataaattcctttgcctgaaacattatattatcatgtaaagatatggaatcctctttccaaaatgttttgccatcccatcgtcctttgtaaaattcatggtaacaagtgccatccctttcgcgatctgttacaaaatatttcatagcatttcctccacaaatcccactcgtatgtgtaaaacctgtagttctgttattttatcaatttatctacagtatgtcaaaaaatatgagtacagtaacaaaccgaggcaaacctttgcggtttgcctcggtttcataaaatccaacggaaatacatatcctacagatacttcttgatctcctcgatcagtgcggtatactcttcatccgagaggaacttctgctgtggattcatagcgaagacgccgccccactcatactcgtctgtatacttcggaacgaggtggaagtgcaggtgatgaccggtatcgccataagcgccgtagttcactttctgcggatggaatgcctgatgcagtgcctcggcaacatggttgatgtcctcgatgtaagcggcacgttcctcggcggtcagctccgtgatctcactcacgtgcttcttgtgtgcaacgatgacacgtcccctgtggctctgctccttaaaaagatataccttggaggaaggaagttcacagatcttgatgccgaatgcggctaccagatcaccttccatgcaatatgcgcaattctgatctgtcatgatgttctccttatttctggttgaagtgtacagcaaatccggcgatctcatcctttaagtaagcaacggtaagctcacccttgtcattgtatttgaaggaagactcatcgaaagcaaagcctctcttctccagatgatagatggcacgatccagataatttgtctggatgcagatgtgaccgtgtgttccgcggcccggattcttcatcatctcgattaaggaaccaacgaacatggaactgttgccaaccttgacatcctgtccaagtaaagttgcgaactttgcggactctgtggaagcaacttcctcagatgcattgttgacacctacatgcaggagcttgaatccaagcatggtagcaactgcctctttggtgagagcggtgatgcctgcccagtcctttgctgcgatcatgtctttgtttaccatccaggaaccgccgcatgcgatgatcttcttgaaatcaagatagttcgtcaggttcttagcgttgataccgccggtcggcatgaatttcatcttggtgtacggagcagccatggatttaatcatgttcagtccgccagcagcctctgccgggaagaattttacaacctcaagaccaagctcgattgcaacttccacatcgctcgggtttgagcagccaggagttaccggaatacccttgtccacgcagtattttacaaccttcgggtttaagcccgggctgacgatgaacttcgcacctgcgtttaccgcacggtcaacctgctcggtagtaagaacggtacctgcgccgactaacatctccgggaactgctcggacatgatgcggatggactcctcagcagcagcggtacggaaggtaacctcagcacacggaagaccgccgtcacataaagcttttgccagaggtgcggcatcctctacatgatccagtgcgatgaccgggataataccaatcttggaaaactcttctaatactttgttcatgattcttctccttttacttatcattcatgttccataatgcggaactatgtttcatgtaatggtacaaaattattataacatgtggaaaaaccttgtcaaccgattcaagaaacaaaatcgtgtattttccataaaacaaaacgccgggacagcagagattccagagttgactttcggacagcggtcatggtatgataacaaggcagttccgcaatacggaacgacagattgaatgatgaaactgactgagatacagcatgggagatactatggcagaagagagagaagcgaaaaatccggtacagtcggcagagcgtatttttcaggtgatggagacgcttgcggaccacggggagatgggactgatggaacttagcacggcgctggatctgcacaagagcactgtacacagactgttaatgtctcttatttatatgggatacgcaaagcaggatgaggcgacgcagaaatatatgctttcctataaggtggtcaacatggcgggaaagatcctcgagcggatggatattctgcaggtggcaaagccgtatatggaacgtctctcggacctgtccggggaagcggtgcatctggtgcagcgcgagggcaaccatatcttatatatatacaagatcgaggcgaaggtcggaacaatccgcatggtgtcccatgtgggaatggtacatccgatgtactgctctggtgtcggcaaagcgatcatggcgacgcttccggacgaggaagtcaaaaagatctggaatgagagcattattgagaaaaaaacggacaagacgatcacggatttctcgcagatgcaggaagtattggatgaagtgcggcagaatggctacgcgctggacgatgaggagaacgaaaagggcgtccgctgcatcgcagcctgcctgcacggctaccagaaagaggtaaaatacgcgttcagtatttctggaccgaccagccgcatgacgagagagcgcgtcagggaacttgcggtggatgtgaaaaaagtacaggaagaactgtcgagagagcttggctattacaaatcttaagattgaattttcaaaaataaaattcaaaagaaaaacatcggctgcgggaataaaaggaaagcgccagggtcatactatccttgaaaacagaagtgattctgagaaaaaggagaatatgactatgagaaagtggagaacactgcttgcaggactggtacttactttcgcggtgagcgcgatggctgcctgcggtacgaacaatgacaaagtcaatgatacgacgaacggaaccggcacggagagcaccgtagacggaaccggcacaaacggaacaaccaacggcacgaccaatggcacaaacggaacgaccaacggcacaaacggaacaaccaacggcacagtgaacgataccaatggaactttaaacgataacggtgcgatggacaacaacggcgcagctgataacaacggaaacggcaatgttgtggacgacgtggtagacggtgtcggtgaggctggaaaggatgtcatcaacggagtggagaacggtgtggatgatctgaccggcaatgacaataataacaacggaaccacagataataacggaaacggcagatagagcgcgttttacggatgagggaaatagagaatggcgaaagcaaaagaggctttcgccatttttgatgaattcctaaaataactatgaaatctccgtaatttccttgtgattaaacaatgtttgcattataatgaacctaaatttcatgatagaaagcgaataggggatattagtgtgaaaaataagatttttcacacgcaagatttgtgcttcgcacaaacttgagatgcgcttagaagcagcgcaagaatggaggattagtatgaatcacaatgatttcagagagattatagatgatgcgccggagacgggcgcagatacaaatacaggaactgcaggcagcagacagccgggaagcgcggataacggtgtgccggcgggaaacgcggctcacggtgcgcagacgggaagtgaggctccccgtgcagaagatgtggcggagcatgagagcacatcaggcaccggagaggtgacacagagttccgcttcggatgacacagaccggaatcaggacacggagtatgaggacatctgctatatctgtagacgcccggaacatattgcgggaaagatgatccgtattccgaacaatatctgcatctgccaggactgtatgcagaagacgtttgacagcatgaacggaagcggtttttccatggatgatatgatgaatatgaacatgggaagaattccgaacatcagcatgatcaatctgtcggatctgcagggcggactgccgaacaatcagaagctgaagaagaaaaagccgaaggcgcagtcggagccggttatcgacattaagaagatcccggcaccgcacaagatcaaggcgtcgctcgatgaatatgtggtcggacaggagcaggcgaaaaaggtgatgtcggttgcggtctataatcactacaagcggattgcggcggatgagaaggacggcgtggagattgagaagtccaacatgcttatgatcggaccgaccggctgcggcaagacgtatctggtcaagacgcttgcgcggcttttggatgtgccgcttgcgatcacggacgcgacgtcactcacggaggcaggctacataggcgacgacattgagagcgtagtcagcaagctgcttgcggctgcggacaatgatgtggagcgtgcggagcacggcatcatttttatcgacgagatcgataagattgcgaagaagcgcaatacgaaccagcgggatgtcagcggagaatccgtacagcagggaatgttaaagcttttagagggcgccgaggtcgaggtgcctgtgggagccagcagcaaaaacgcgatggtgccgatgacgatggtcaacacgaagaatattctgttcatctgcggcggagcatttccggagctggaggagatcattaaggagcgtctgaatcaggaggcttcgatcggattccgcgcgaagttaaaggatgagtatgacaaggacgagaacctgctctccaaggttaccgtggaggatgtgcgtaagttcggtatgatcccggagtttttgggacgtctgccgatcctgtttacattagagccgctctcggaggatacgctggtgcggattttgcaggagccgaagaatgcgatcttaaagcagtatgagaagcttctcgccatggacgaggtcaagctggcgttcgatgaggatgcgctgcgcgcgatcgcacacaaggcgaaagagaagaaggtgggagcgcgtgcgctccgcgcggtgatagaggaattcatgctggatatcatgtatgagattccgaaggacgacaacatcggcatggtcacgatcacgaaggactatgtggagaagaagggcagcccggtcatcacactgcgcggctgcatcggtatcgggagtacggagaatccgcagattgcagccagcaactgataatatggaataaatagttacactccggcatctattgttaagaaagcaatggatgaccggagttttttatgccaaattgcatggagcaggtatattcagaggagtattatgattttttgattccgtacggggtggaggcagaggttccgtccacgcccggatgcgtgcagcgcatcgcggaggattacgacatttttttctacccgcgagagggactgccgccgctttctatcgggaattatacctacacggcgataccaaaatgctacgcactgctcgatacgacggcgctcgatgcatcgggaatcacccggctgcagaatcagccggtgcttgcgttaaaaggcgaaggggtcctggtgggcgtcatcgataccggcgtagattacacaaacccgctgttccggtattcggacggcagcagcagaatcctgcggatctgggatcagacggtacaggacggaacgccgccggagggaattctgtacggtgcagagtaccgtaaagaggagattgatgaagcgctgcaagcagagcggccgtatgatgtggtgccgtcccgcgatgaaaacgggcacggaacattcgtgacgggagtcgtgtgcgggggagaggatatcccgaacggctttatcggggcggtgccaaacgctgggattgccgttgtaaagctaaaagaggcaaagcgttatctgcgggaatttttcttcgtgccggagggagtgcctgcctatcaggagacggacctgatgatggcggtatcctatttaaatggcgttgcaaatgtgttgaatatgccgcttgtgatctgtcttgcgctcggcaacagcatggggggacacggtacggacggtccgctgcctaattttctgaactatatcagtaccaggcggaggcgttcgattgtgacggcaacgggaaacgaggcgaacaccaggcaccactttcagggggcgctccgtcgtgagatggactatgaggatgtggagatcagcgtggaacaggatatggcgggctttttcatagagctgtgggcgggcgcgccggaattgtacgcgatatctgtgatttcgccgacgggcgaacggattccgaaagtgtcgctgcgttccggtgcctccaagtcattccggttcgtctttgagggaacgaccgtgtcggtggattaccgtatcgagacaaaggagacggcaaaccagttaatctatctgcgcttttccgatgtgagaagaggactgtggattgtacgggtttacccggaaaatattgtgagcggcaactataatatgtggctcccgatgcagaagcttacggacggaaatgtgattttcctaagatccaacccggacacgacgctcactgcgccggggacggcggcacaggtcatcacggtcggcggataccaggtatccaataacagcatgtatgcggattccgggcgcggctacacagtggcgggggagatcaagccggattttgtggcacccgcggtgaatgtgtacggaccggggctgcgtggaaactatgtgacctacacgggaaccagcgccgcggcggcggtgacggcgggggcggtcgcacagatcatgcagtgggcgctggtgcagcagaacgatccggtgatgtccaacgccgcgatcaaaaatatgctcatccgcggtgcaaagcgctcggaggacagggggtacccgaaccgggagtgggggtacggtgcgctggatgtctatcaggcgtttgagtatttaaggctgtagagagaacagaagatgtgagatagaaaatttttacaaaaaccggaaatgggtgcaaccgtttccggttttttgcgtcttattatatgaaagacaaaaactggatgatagaaaagagagggagaagcttatgaggagaaaaggaatggaacgggtgacggcaggtgtgcttgcggcagtgatggcattggggatgacaggctgtgcgaacagcggaatgtccggtacaaccactgatcttaccggacaatacgggaccaaagaggaaggtcagacggaaggaaccggagcaaacggacagacaggacaggcagaagatacaggaacggaggatactgcaatggaagaaaaagatctcggtgctatcagggaagcatttgagtattcctatacgcagttttccttaaatctgctgcgggagagcagaaagcaggtgcagaacggcgaggacgcgaagaatacgatggtgtgtcctctttccgtgatgatggcgctcgagatggcgcggaccggagcggacggcgacacgaagcagcagatgggagcggttttgtacccgggaatgtcggcggaggatggcagtatggtgcttggcaggatctgcaagagcctgccggatgcagagggcgccagattccacatgtctgattcggtgtgggtgaagacggcggacgatgtatttgtgccggatgagaatttccttgacaccgtaaaaacggcgtatgacgcagaagtctttggcgccccgtttgacgagacgacctgccgggacatcaaccgcctggtggagcaggagacagacggcatgataacagagattctggatcagattccggagctagcggtcatgtacctggtgaatgcggtggcgtttgatgcggagtgggaaacgccctatgatgagagccagatacaggatgccacattttatgcggaggacggaagcgggcaggaggtttccatgatgtacgataccacgtaccgctatctgaccatggaacatgccgagggcttttgccgggcttacaaggagggctatgactttgtggcgctgcttccggaggagggactgtcactgagcgaatggctggaagaactggacggggaaacgtttcacgagacaatccggcaggaaaatgatacaatgatagagacgggtctgccgcaatttacaggcgagaccgatctggaactaaaagatacgctcacggcgcttggaatgccgctcgcgtttgatgaggaacaggcggatttttccaaaatggggtactgcccggacggaagaaatatcagcatcagcagggtgctgcacaagacccacatcgatgtggacgggcttggaacgaaagccggagcggccacggttgtggagatgtgcaaggagatggcaatggttgaacagccggagcgcattattttagacaggccgtttttatatgcgatcgtggagaaggacaccggtattccggtgttcatcggaacggtggagagcttttaactgagagggagaaggcatggaggatgaaaaaatcatagcgctgtactgggacagggatcagacggcgattgcagagacacagcagaagtacggacgttactgcgggagcatcgcgcacaacattgtacatgatgcgcaggatgcagaggagtgcgtgaacgacacctggatgcgcgcgtggaattccatgcccagggagcgcccgcatcttctggcggcttttctgggtgcgatcacgcgcaatctgtcgctggactgctaccgcagaaagcactccgaaaagagaggcggaggcgtcatgccggatatatatgaagaactgcatgactgcgccgggggcgaggagccgctgacgcagatagagcgaaaggaactggcggcgtccatcaaccggttcctggaggggttagaccgtgagagccggattattttcatgcgcagatactggtatatggatggcatcggagcgattgccgggaggcttgcggtcagcgagagtaaggtaaaatcttcgctgtaccggtcccggggaaaactgcggagacatctggaacgcgaagggctgctttcatagcggcggaaaggagcgggaaatatgaagacggacgatttactggatgcgctcggcgaagcggatcctgcctacatacaggaagcggaggacgtacgctatctcggagcacgcaggaagcattttatgcagatggctgcctgcgtggcacttcttttgatcggaggttcctacggaatatggcagcagtatgagagtacggcgcgcacggacatggcaaagacggagagcgcggaaacggcagaagcttatgatactgcggcatccgacggtatcatgacatctgacgcggcaacgccggacggcaccgcggagagtgcgaaggaatatgaggcggcggcacaaagcgcagcggaggatggcgacggtatacaagaggctgcccagccggagagcgctgcgggaattgactggtattttaacgaagtggaggaacttcagacatcgattgcctgcggggcggaagcggcgaagacggtttcactcacagaggaacagcttcagaactattacggaatcaaggtgattccggatgcaattccggatggctatgtgcagacggatgaggagaaaacgtatcagattggctatgatgcagatggcaatgtgatcgatgacaactgtgtcatgcgttatgagaacagtgagacagcgggatggtttaccattcgcgcacgctcaacggacatgggggagatgacgtcctatgtatccggcggattaaagccgatgacggtttccggtgtgaaggtgacagcagcacattatccggcgggcagcagtggaggaacgttcacggacgggtatctggcgacctataagaaaaacggtgtgaccgtgaatgtgcagtcggaaggactgagccgggacgagttctgcgcacttgtggagaatctgctggcggagtgacggcttgattttatgagagagaagtattatgcttgctttggtgcagtgacgggagagtgcattacatctgcgaaggagtgctgcatcagaaggaggaagcgatgaaaatcacaacaaaacaaatcacaacgacagcggttcttctggcgatctgtatcgtgagccagttttttaagaacacgagcgtctatattaccggaccggtcatcaatgcatgcctgatcttagcggtgttaagtgtgggaattccctgcggcattattctctctgtgatcacgccggtcacatcattctttattacgggaagcccgatcatcggtgccattccggcgatcatgccgtgtatcatggcgggcaatgcccttctggtcctgggtgtgggactggtcacgaaaaaatgcaaaggaaacggcggactgattgccggcatggcggcaggatctgtcgtaaaggcactgttcatgggaattgtgatctcgctgattctgattccgaaccttctgccggcaccgatggaggcaaagatggcagtgttccagacgaccttttccgtgacgcagcttgtgacttccctgatcggaagcgtgtatgcatttattctctggattccgttgaaaaaagtggtaaaatagggaaaagagactccgatggcggagcgggagaaaagatcctgctccgcttttttgcggcgtttttcattccatatggatatgggaagatgactaatatataacttacaatcatgagcggcataagcggttggaataatcttgacactgaaaaaagaaagtatcataattgatttcaagaattttatatgtcgggaaaggaatggtagcataatggatatcagatttgtaaaaagagacgtattaaaggagaagccggatcagaaacatctcggattcggcaagtatatgaccgattacatgttcgtcatggactggacgaaggaagacggctggaaggatgcgagaatcgtgccggaaggaccgatcagtctggagcctgcctgtgtgacgctgcactatgcgcaggagacatttgagggtatgaaggcataccgcacggcagagggaaagattcagctgttccgtccggagatgaatgcgaagagaatgatcaattccaacgcgagactctgcatgccggagttcccggtggatatgttcgtagaagcggtaaaagcgctggtaaaggtggaggcagactgggttccgtctgagccggagacctctctttatatccgcccgttcatgttcgcaacagaggctgcgctcggcgtacatatggcgtccgcttacaaattcatgattatctgctgcccggtaggcgcttactatgcagagggcatcaatccggtgaagattcttgtcgaggacgagctggtgcgtgcagtcaagggcggtaccggattcaccaagtgcggcggcaactatgcaggctccatcttaggacaggtaaaggcagaaaagcttggttactcccaggtactctggctggacggtgagcaccgcaaatacgtcgaggaagtcggtacaatgaacatcatgttcaagatcgccggtgagatctacacagcaccgatcgagggtacggtacttccgggcgttaccagagattccatgattcatctgttgagagactggggttacaaggtaaacgagaccagattatccgtcgatgacctgatgaaggcaggacatgacggaaccttagaggaagtattcggaacgggtaccgcagccgtgatctctccggttggtgaactccgctacaaggatgatgttgtcacgatcaacgatttcaagatcggcgagctgacacagaagctgtacgacacactgaccggtatccagtggggcaagcttccggataagtacggctggaccgttccggtagaataggatttattccgcatcgcgctgtatctgcccggtcagaggaagtcttacgattacgacggctccgcctgccggggcattacacagagcgatcgatccgccaagtccgcgggcgagctggtcggcgatggagagcccgagaccgaagtggcttttgtcattccggtcggcggattccctgtaaaaggcttccgtgccgtagagcagggcgtcttcgcagaagccgggtccctcatcggatacagtgagaaagagcgtgctttctttctcgggtgcatccctataatcgcggatggaggcatctaaagtgaccgttcctttgtgcggtgagtagcacacggcattgtcgagcagattgtttaaaatacgccgcagcggatgttccggcagtggcagaacggctggaagagtctcggtggaaaaaagaacatgcagttcttttttctgaccgagactttttgtattcccgagcagatcgtcgaaaaacgatgccgtgtgaagctgcgcctgaaaacggcactctgcggaacatgcagcgggatcatccgtctttgcgagctcgataattctcgacagatagtcctggatctgcgcggcattttccagaataaaccggttgcaggattgctgcgtctcatcaagcgctgtctcagacagaagttctgcgttcccgcggacgatcgtaagcggcgtcttgatgtcatgggcgagcgcggaaaactgacgtctgcgttgctgctgcatgtgccactgctcttttaaggaggcggaaagttcggatttcagcgcgtccaaagaagcggctacctggttgaattcgcagatggcagtcggccggatggtaaagtcgagattctgattgcggatttcgtcggcggcttcctgcagatgaaaaagttcccgcgacaggtattttgcctgccgtgtgatgacgagtacaaaagctgcaagaagcaggaacagcaggagaaacacttccagcagttcggcgctcggaaagagacgccggagcgtgggatttgcaaaggcagaccggaaatcataagtgagcaccacaatccgggtgtcggtctggcgtttaacataggttcgtccgagcatatttgcggagagggaatcctgcccggaaagtgcgagaagatctgcattttcgcggatggaaccggacatgtccgtttcaagaagctctccggatgcgtcatagatggcgtagccgcaggcggatgggatcccggaagacacgatgtccgtatgtgcgccgatggtgtgaaggtaggcaagagcctctttttcggcggcgttcgcaggcaggatcagacccgtaccgacggagacggtaatctggagaagccacagcaggaacgccagaagcaccgcggcgacaagctttagtaaaaagcgcacaaaaaatgtgcgcagccggatttcttttttcttttttttcatgcgttccatcgataaccgatcccccatactgtctgaattggcgccatatttactgcggcaaattttttccggatatttttaatatgctctgtaatggcagacgcatcgcctgtcttgtcgtatcctaagaccgcttcgtagatctgctccctggaaaatgtctgcccgcggttttttgcgagcagaagtgtgatctcatactccgtcctggtaaaggggagcgtgacaccgcctgctgcgacctcgcgggaggcgagcagaaagcggatgccctgtatggagagacagtggtgtttttcgcgctgctcccggcgcagatgtgcggcaacgcgcgcacgcagttcaacgatggagaagggctttttgatatagtcgtccgcaccgacggaaaaaccgtagtcgacgtcctcctccatggtctttgcggtcaggaacagaatcgggcagtccgtgtcgtcgcggatggcgctgcagagttcatagccgtccgtctgcggcatcatgacgtcgagaaggatgagatcatactctgcgaggtgcgccgcaagatccgccggtacatgcggcatgcaggtaatggtatgcccctcccggcggagtgcatgttcaatcagcgcgaggatgccgggatcatcgtcaattgcgagaatgtgagccataaaaacctcatttctatcaagaacccattccataaagggtcaggtacaaaaggaacgaaagtgcgtacagcacgtaaatgtgcgtcggataaaaccagtagaacagctttttggagccgtgtccacgggttccattgtaacataacatagggataacggcaaaaacttccagccactcataagcatcggtaaaaaagaaagaggtagaagttcctgcgggcataaaaagcagcacgggcaggatgtcccacgcaagcacgaaaagtgcaaaggcacctgcctgcaatcggcggtgtctgtgcgtcaggtagagaatcacgccgccgagcagtgtggcggtgccaccgtcgatgatcgcagtgtggcagggcaggacactgtacaccagaaggtttaagagaaaattgccgtagggaatgccaaaggctgcagatacggcgaacagcccgtacagaagaaagggcagaaagaccggaatcaggatggcagaaagtccccggatccactgttttttctgacaccggtcgatgccccaaagaacgacgagcaggacggaaaaggatgcaagcatctgattctgcgggaaaaagccgtccggccggacgaggccggatgcaatattatagaaggaaaactgcaccagtcccatgaaaatggcgatggcgtaaatgcgcagaaaatattttttccggtcgtgcgtgtgaagaaaaccctccacgatacagaagaggaacagcggggcggcaagcctgccgatccacgaaaagaacagtgggatcttccctgtaaatgagaaaaaatagtgaatgtggtcgagaatcatgcagaccatggcaaaatatttgagcgcaaagtctgagagtccccgttgttttgtgattgttgtctgattcatacgttctggaatcctccttgtttacttcttgtgataagttgtgataagatgttcacagaaacagcatacaggcaaattataaggattttataaggaacggaaaggaagttataaaatgacaaagcaggaaaaagcaatcgaattgcatgacaggggatgcaactgtgcacaggcggtggcgtgtgcgtttgcggaggagatcggcgtgccggaagagacgctgtttgccgcggcggaaggattcggactcggcatgggcggcatggaggcaacctgcggagcggtctcaggagcggtgatgcttgcgggcttcaagaacagctgtgccgatccaaagaacccgaagaccaaggcggcaacctatcagctgaccagagagatcaccagacagtttgccgagaagaaccatgcgctcgtctgtaaggaattgaagggtgtggaaaccggcgtggttttgcggagctgtccggactgtatccgcgatgcggttgcgatcgcggaaaaggtactacaatgaactccgacgagttcatcttagaagttcctgtggaacttccggtacgcaaaaggcggaacacaacgatgatataataataggtataaagtcgaagcagagcagatgtccctgcgtggaagagttgtctttcacacagggacatttgtatatttgcacgaaacagaaccagtcaaaaacagccatctgcaaaatatgcacaagaagaaaaaatgaaaaaccataaaattatacgaaacacacaaaagaaacagaagtattttcaagaaaaagagaagaatattgtatgttctttacagacctccattgctataattcataatgtaacaaggagttacgaatacaaaaagggaggtttttcagagatgaaaaagaaagtaatcagtttaatccttgcagctactatggttgcaacaatggcaacaggatgtggaaactcttctggcgagacaaccacaacagataacgcagcatccacgacaaccgatgcagcagcaccggctaccgaggcttccgatacggcagcagcagcaacagaagcagcaggcggtgactatgcagacaagaaagtcggcgtatgcatttaccagttctccgataacttcatgacactgttccgtacagagcttgagaattatctggtagagcagggcttctccaaagacaatatcacaatcgttgacggagcaaacgatcaggcgacacagacaggtcagatcgacaacttcatttccgagggcgtagatgttctcattgttaacccggtaaactcttcatccgcagctaccatcacagacaaggttgtagcagcagatatcccgctcgtatacatcaaccgtgagccggatgcagaggaagagcagagatgggaagacaacggctggaatgttacatacgttggatgtgacgcacgtcagtccggtactttccagggcgagatgatcgtagaccttggtcttgacacagtagacttaaacggcgatggaaagatccagtacgttatggtagaaggtgatccggagaacgttgatgctcagtatcgtaccgagtattccgtaaaggctcttaccgatgcaggtcttgaggttgaatgcctctccgatcaggttggtaactggcagcaggatcaggcacagcagatcgtagcaaacgctcttggacagtacggcgataaagtagaagttgtattctgtaacaacgatgcaatggcacttggcgcattacaggcaatccagtctgcaggacgtaccgtaggtaccgatatcttcttagtaggtgttgatgcattatccgaggctcttgaggatgttgtagccggaaccatgacaggtaccgtattcaacgatcacttctcacagtcccacggtgcagctgatgcagcaatcaacttcatcaacggtgagaccaacgagtattacattggttgtgattatgtaaaggttacaaaagacaatgcacaggaaatccttgacatggtaaaataattactgcgcaggatgattgatagcaggtaaacagaaggtgcgggtgttttcgggcatccgcacctgtcttaaagatatgaaatagttgtgtgacagaccagattagaaaaattagaaaacatcgacaataacatcgacagtacacagataacaacagaatctgtatcaatatagaaggaggagaaacatggctgagtacaaactggagctaaagggtatctgcaaatcgttcccaggtgttaaagcgcttgacaatgtacagctttcccttcgtcccggaaccgtccatgcattgatgggtgagaacggagccggcaagtctaccttgatgaaatgtcttttcggtatttacaagatggacgcgggagaggtttatctggacgggcagaagattgaggtcaacaacccggatgaagcaatgaaatacggcatcgccatggtacatcaggaattacagcctgttccggcgagaagcgtggctgagaacctgtatctgggaagattcccgacaaagaattacggaccgctcaaggtgattgatcacaagaagatgtatgcggagacggagaagtggctgaaagaggtaaggatggatttcgacccgaaggcacagctcggcacactttccatcggtcagatgcagtccgtggagatcgcaaaagcggtatcccagcaggcgaaggtcgtgatctttgatgagccgacctcctctctttccgataatgaggtagaagcactcttccgtatcatgaatgaccttcgtgataagggtgttgcaatggtatacatatcccacaagatggatgagatcaagcgtatcgcagacgatatcacgatcatgcgggacggtacctatgtaggaacctggccggcggcagagctgacgaccgatcagatcatcgcaaagatggtaggacgtgagctcacaaacgtatatccggcgaaggagaatacaccgggcgaggtcatcatggaggtcaagaacctctgctcaatccatgcaaattcgttccagaatgtcagctttacgctccgcaagggcgaaatcttaggctttggcggactggttggagcccagagaacagagctgatggaaggtatcttcggtatccgcggtatcgcatccggtgagatctatatgcatggcaagaagttaaagatcaagcatccgatcgatgcgatgaacgcaggaatcggactcattacagaggaccgccgaggcaacggtatctttggatgtctgtccatcaaggacaacgttggcgtctccatttataacaagtacctgaaagcaggattcgtgctggatcataagaagatgaacaaagttgtggatgacagcatcaagaagctgtccatcaagacaccgagcatgaacgagcacatttcaaacttatccggtggtaaccagcagaaggttattatttccagatggcttgccaatgatccggatgtgctgatcatggatgagccgacaagaggtatcgatgtcggtgcaaagcatgagatctacgagatcatgaatgaactggcggcacagggtaaggcaatcatcatgatttcatcagaaatgtctgagctgcttggtatggcagaccgcatctgtgttatgtgtaacggtaagattactggcgagatcgaccagccggaagagatgacacaggcaatggttatgaactttgcaacgagattctgatgagataggaggagacgaaaatgacaaagacaaatcaacagaaagtaaaagatttcttaatcaacaacggagttatcatcgtcatgttcatcctggtaatctataccggattcacatccgataacttcttcacaaagaacaacttcatgaatattctgatgaatatgagttcacgactcgtcattgcacttggtatcgcaggctgtgttatcacagcaggatgtgatctttccgcaggacgtatgatcggtttcggtgcatgtatctccggtatgctgttacagcgtatggattattccggaaaattcttcccggatatgcagccgctcaacgtattcgtcgtagcactgattgccatgctggtatgcgcggcattcggtacggttaccggatttttcattgcttacttaaacgttccgcctttcatcgccacactggcaatgatggagatcgtctatggtatcggacttatcgtaaccaatgcaacaccgctcggcggctatgtagagcagtacacgaacgtatctaacggtaagttcctcggcatcaactacctgatctggatcgcaattattgtggcggcgatcacatggttcattttcaacatgacccgtcacggcaagtacatgtatgcaatcggtggtaacccacaggcagcagaggttgccggtgttccggtaaaagcaactctgatcttaatctacatgaaagcagcagctatgtatggtcttgcaggtttcatgctcggtgcaaaagccggcggtgcatccgtccagaccggatatggttacgagatggaagcaatcgcagcttgtacgattggtggtgtatctgtaacaggtggtcgtggtaaagtatcatccgcaattatcggtgttgccgtattcgagctgttaaaggtagctctccagtacctgggtatgaatgcaaacgcacagtacattgcaatcggtgttgttatcttcatcgcaatctctctggatatcagaaagtatatagcaagaaagtaaaaagtatattataatgaatagcggctgggacattagaaccagccgctattttagatttgagagtacaggaggatttttaaggtgacggttgatacgattattgagcaggcggggattccgctgcttttacttgtgatctgtgtatattatgccataaggctgatcgttttacacgacagtcaggcaatccgcgggaaacataagccgccggtgaaggacgaggaagcgtactgcaaggcgggaggaaagctgctgctgttcttcggtgcggctacctttttgatggcgattctggtgtttgtgaatgtctatgtggcagtggcggagatcataatctgtacggtgattctcggcattctctggaagcggatggaggatcagtacggaggttgaatgaatgagtgcgagtgaaaaggagcgggagaatatgagtttgtattccgttttgctggtggatgacgaggaagaggtattccaggtcatcatgaagaagctggactgggaaggcatgggctttcgcattgcgggctatgcaagaaacggtgtggaagcgcttgagatggcggaggagctttccgtggatgtcgtcatgacggacattaagatgccctatatggatggtcttacgctctgccggaagctaaaggagcagtaccagaagatcaaggtcattattttctccggttttgatgaatttgagtatgccagggaagcgatcaagatcgaggcggaagaatacattttaaagccgattaatgccaacgaactgcgcgaggtctttgagcggatcaagaacaatctggacaaggaactggacgaaaagcgcaatattgacaagcttcgggaatattatctggagagtcttccgatgctgcaggaaaatttcctgacgtcgctcatcgacggacggattccggaggactccattgaggaatatgcaagaaactgcagtcttacgctaaagggaccctattttgtggtgaccgtgctgcacatcagcacgaccaacccgatggagggggcgcttccgatcgatccgtttttgctggcggtctccgtgaaaaagctggcggaggagcagctggcagcttctgaatatgacagcaagatcgtgacctatctgggggatggcattgtgattacccagctgcccacggaggaggcgatcacgcgttttaccgactgcatggataagatctgtaagatggcaaagcgtgtctgcaaggcgaagatcacggcgggaatcggacatgtgtgcagcggtccggaagaactgcagatgtcctatctcggcgcgaagaatgccgtgtcctaccgtgtgctctacggcaataccagagccatcaatattgcggagatcgacccgcaggagaatgccgatctgccgtgggaggagccctttatccagaagatcatcaaaaaggtcaaggtgggagaggaacagccgcttctggatgcgattgcggaatttacggagaagcttgcgggcagcaagatgtcactgcagcggtaccggattctcattatggagctgatcacggagctgtcgcgtttcggggcgaacaaccagatcaacctggaagatgtgttcggcggcaacggggatgtgtatacacgcgccatgcagctggagtcgacggatgcactccgggaatggctgtgtgagaactgtctgaaattacaaaaacaggtgcagaacgagcgccaggatacgacgaagtcctttgtgtcgaaggcaatcgactatgtgaaggagcattatgcggatactgaccttggaattgagacgatctgtggatacctcaatgtgagcgccgcctatttttccacggtgttcaagaaagagaccgggaagacgttcatcaactatctgacagattaccggatggaggaggcggtggagctgcttctgacacagaatgagaagacttacgtgattgcggagaaagtcggatataccgatccgaactatttcagctatgtattcaaaaagcagttcggcatgtcgccgtccaagtataagacaagccggatggaagctgcgcaggaggcatagggcgcatagggtgcaaagaggatgagagaaagagtaaaacagtggcggcagaaggtcacttccttcctggaaaaacacatcaagccgcagtccattcagatgacgattgcattgtcttttacgattgtatcggtcatcagtatgggtattctggggatttccctgtacaaccgttttgtcaataaaatggaagatatgacgacgcagagcgcggagcagctgctgaaccagacggcaatcaatctggagagttatctgcgcaacatgcggcgtatttccgacgccatgtactacagcgttattaaggacaaggatctggcgacggactcgcttgatgaggaaatgaaccttctctatgaggcgaacaaggacaatctgatcagcatcgcctgctataccaacgacggaagactggttgctgcagcgccggttgccacggagaagaacaacctcgacatcgtggatcaggaatggtttacggaggcgacgggacagatggagaacgtgcatttttccacgccgcatgtacagaatttgtttgacgatccgagttaccgctattactgggtcgtatcgctaagccaggcggtggagctgacaagcggcggcaattcgacacttggtgtgctgcttgtggatatgaattacagcagtatcgagcagcttttgacgaaggcaaatacggacaatgcgtcggagtatgtctatctgatggacggaagcggggaactgatctatcacccgaagcagaagctgatctacacggatctgttttcggagaacaatcttgtggcggcatcctacgaggatggcagccacaaggaggaatatgacggggaaaagcgcattgtcacggtcaagaccatcagttacaccggctggaagatcgtgagtgtggttccgatgagttcttttgatatgggaatctcagggatgcggatgttcgtgattcttctgatgtcgctgtccatgctgatgattattcttttaaaccagtttgtctctgcgaatatcgcaaagccgctaaagcgcctgaacgattcggtgaaggactgggaagcgggaaatatgaacccggatatctatgtgggcggttcgcttgaggtggaacatctcgggaagacgctgcgttctacggtggcgcagatccaggaactcatgcatgatattctggtggagcaggaagaaaagcggaagagcgagctggacgccttgcagtcacagatcaacccgcactttttatataatacgctggactccatcgtctggatgatcgagggcgagcggtatgaggacgcggtgtttatggtgacgcagcttgccagcctgttccgcatttccttaagccgcggaaagacgatcatctccatggaggacgaattaaaacatgccagaaattatatgaatatccagaagatccgctataagaataaattcactgtggaatttcaggtggaggatgctattttaagctgctgtacggtaaaactcgtgatccagcctttacttgagaatgcaatctattacggaatggaatccatggacggcgacggtgagattacggttgtgggataccggaagggagacgatgtctatgttgaagtgcgcgacaacggactcggtatgccggatgagatggtagatgcgctcctgacagagaacaacagagtgcgcaagcatggctccggtgtgggactcatcaatgtacataaccggatcagactccgcttcggggagccgtatggtcttgagattgagagctgtctggatgaggggacgaccgtgcggattcaccttccgtacattgcgtactcaccggaaaatacggaactgctggagggaggaagactaaaacagttgaagggggaacggcaggatgaagaaaaatagactttattttggtatgttgatcctgatgctggtggcggtgattatctgggcgttttacaatatgctaaacgtcggtaagcaggagacgtcctaccgcgtctccgtggttgtcgagaacagcaacagcgaccgctggacttccctcagacaggggcttgagcaggcagcgcgggattacaacatcagtttgagctttgtgtcgacggggagcttttccaccgcaatggaagagatggatgtggtcaaaaagcaggtcacaaatggagccaacggcattattctgcagatgaatacggatcacgccggacaggagctggaggatctctccggtcagacggcggtgcttctgctggagacggacgttgatccggaaggggtctacgcgttggtggcgccggataatgaggagatgggagcagcgctcgcacaggcggtgcagtccgatttcggggatgaccttgccggcaagcgcgtgggaattcttgcgtgcagccagagccagcgctccatgcagcagcgttatacgggggtatcgcagggattgcgcgagagcggtgcagtcgtcgagtggagcctggaaggaaaggcggagagcatcaaggacgcgttctatacgttagagcaggacaaaccggtggacattctgattgcactcggcaatgacgagacggagatgatggtggatttttttgccggggatgagctgggctggagacttgaccggtgctcgctgtacggcgtgggcagttccgagaaaaatgtatactatctggacaagggctggatacagacgctcgtggttcccaatgaattcaatatggggtatcagagcatggaggcaatcgcaaagcagctgatttatcacatggataccacgagaagcagcaaggtcaattatctggtggtcgaccgggaacatctgtatgatgcggatatccagaaagtgctgttcccgattgtgcagtagcagagagaaacaggagaagtgaggaagggtgttatgtcacagaggatgctaagaggaatggcggccgggcttggtgcgctggtgtcactgggaagcatggcgggctgcgggacagacggccaggtacagaaagtgacaagcattaagatcggcgtcaccgtatatgatcagtatgacacatttgtatcgcagatgatgacggatttcaacgaatatgcggcagagcaggaagaacagacgggcattgccatcaatgtggaagtctacaatgcggccggaagccagtcgacgcagaacagtcaggtcgaggaaatgttagatgccggctgcaatgtgatctgtgtgaatctggtcgaccggacagagccgacaacgatcatcgatatggcggaaaaaaataatgtgccggtcattttcttcaacagggaactggtggaggaggatctggagcgctgggacagggtctattatgtcggggcgaaagcattcgagtccggaatcatgcagggggagattgcggcggatgcgttcaaggagaatccggatgctgataagaacggtgacggtgtcttccagtatgtggtgctggagggagaagccgggcatcaggatgcgatcgtgcgcaccgagtatgcggtctcaacgattatagacaacggcgtggaggtggaaaagctcgcgtacgggattgcgaactggaaccgggcgcaggcgcagaccaagatgacgcagatgcttgcggaatatgacggggagatcgagcttgtaatcgccaacaatgatgatatggcgctcggagccatcgatgcgttgaaaacctcgcatctgaagcgggcggactggccggtggtggtcggaattgatggaactgatgtgggacttgccgccgtggcatccggcgagatggtgggaaccgtctacaacgacaaggaagggcaggcacaggcaatgctcgatcttgcctacgcgctctccgtgggggatacgttagacgacctcaatctggagaacggaaaatacatcagacttccgtattctaaggtaggatcgagagacgtgaagaattatatgaaataaaatacaggaaagtataagcagaaaacagccgcacagagtgtgtaaaacattctgtgcggctgttttttatgcttgcagataggtttcgccgttctcaatcatctggcagaaagtctcgatcatgactttgcggaacggggcaaactcgtccgccagatcaaagagagccggataatccctggtcaccagaaggatctctgcggcgagcttttccgccaccttggcattcttgatcggcacaaaaccaaagagcgtcgaacagtaggctttgctcccggtgcaggaggagatgagtccccgcgcaaaatcctgccactcttcgatgagaaccgcatccgcggattctggaagcagatcatccggggagagacaaagatccttcatgtaagtgagcagttcttttttctgacgctttttctggaaaaaagagacgcctgcggctgcggaagccttgatcatggtccaggcgcggaaaaaaccatccacagtgccgtcttttttttcggaaaaaaagcgccgctcgcagagcatttcccggtaggaatctgcaggaacggcaaagccttctgcttttgcgcgcttaaggtgttcgcgccgcagcgtgccggtgggaatgtcgtagtagcgcgcgggccagtctttggtgtagtcggtggtgtcttctttttggtttttcaggagcatgaatgaggttccttctttcactgttgtatgagctaagtatagcatacccggcggcaaaacagaatcccctctggacttttttcacgtatcatagtatagtaaacacgttgaaccttgataactgcataaggggaacgttatatgttcagatacgcaatctgatctgtaccgtaatccacagagattccctaagcgccatgcacctgccctggcaggttaacgaggagaaaggtgatcgaaaattcggcggatgcctttccgtaccgttccagtgcgagacacatcggcaaatatgcgggtgactgcaaaacaaatacgatgtttgatggaacagactttgatggaatagaaatagaagagacctgaataaaaatattgttatatacagattgtaatagaaatggggaaatcatatgtgtggaattataggttatacaggaagtgaggacgtaagagaagtccttttggatgcgctggaactgttggagtacagaggatacgacagcgccggtatcgccctgcgcgacgaggagagcgggaaaacagaagtctgcaaatgtgccggaagagtcagtgatctgcgggcgatctgcgcgtcagaaaaagtggtgtcacagtgcggaatcggtcatacgagatgggcgacgcatggtggtgtgaacgactgcaatgcacacccgcatcaagtgggaaaagtcacgctcgtacacaacggcattattgagaattacagggaactgattgcggattacgacctggcggatacattgaagtccgagacggacagcgaggtggtggcagcgcttttgaaccggttctatgaaggaaaaccggaggaagcgatcaagaagaccgtctcgaagctgaagggaacatttgcgcttgtcattttatttgaagatcagaaggatgtgatctattcaacgcgcaatgtcagcccgatcgtggcgacgatctgtaaggaaggcgcgatgcttgccagtgatctgacggcgctctgccgttttacgaaccgttattttgtcgtgccggagtatcatatcttaaagctgtccgctgacaaactgacactgacggattttgacggcaatgagatgctgccaaagtatctgaccgtggactgggaattaaacagcgccgggaagaacggttatccgttctatatggaaaaagagattatggagcagccggaagccatcgagaataccatcaggaaccgtatcgtcggaggtatgccggattttacagcagacggcgtgccggacactctttttacagagtgcgagcatatctgcatcgtagcgtgcggaaccgcaatgcacgcgggactggtggcacaggcgctcgtcaagtccattcttcacatgcacattgaggtgcagatggcttccgagttcatgtattcggatccggtcatcgacgagaagacgcttgtgattgccgtgtcgcagtccggtgagacgatcgatacgttagaggcggtgaagtatgcgaagaaccgcggggcaaagtgtcttgcgatcatcaacgtcaagggttcctccattgcaagagagagcgactatgtgctctacaccaatgcgggaccggagatcgcggtggcgagtaccaaggcgtatacgacacagcttgcggtattttatctgatcgtggcgcgtatggcgcacagcagaggtgtctttgacgacgcgcagacccagagctttgtgcgggagctgcagcggacaccggaggtcatgaagaaggtgctggagcgccgcagggatatccatgtggttgccaaaaaggtgctcggcgctaaggatttgttcatgattggaagaggactggattactcgattcttctggagggatcgctgaagttaaaggaggtatcctacatccactcggaggcgtacgcatccggcgaattaaagcacggcccgatcgcgctgatcacgcaggatacgccggtggtggcaacggtgacgcaggaaaaactgatgtccaaggaactttccaacattaaggaggtaaagtccagaggagcggacgttgtcgtttttatcaaggaaagcattgtgggagatttagcgaaggagtacgaaattttcacgctgccggatatgcaggatgagttcatggtgctgccggcatcggtggcattgcagctgctcgcgtactatgtgtcttccgataagggattcgatgtagataagccaagaaatctggcaaaggttgttaccgtagaataaagcagaagatctgtggaaggtgtggatgagacgcgcgtgtcttagcatataacggaaagaaaaaagggattgccgcttgaagcaggcagtccctttttgatgtgcgagggaatatgataagaagtacatcctgccgatttctgagggaaatgcagatggaatattcgttggagaaaaatgtgagcatttcttccggttgaatgtttgcatcgaattccgtgtctcttccatgtttggacaatccgacggggcatgtccgacacaccggagacaatgggcggactttctggtgtccctaatggcacctcttcacagacaatataaaaccgcgcgaaccgaactcgccggcatctgctattgaaaatagggcagatgccgcctcagacagcggcttcgcgcggttatgttttgttcagaggtgccaataagggacacacacaaaagtcctacaaattgtcttccgggatgcggacatgacccgcggagtgctccaaacttggaaaaacacggatcatcgaagatgcaaacattcggctggttagaaatgccacattttttgaaccgaatttccagatgcattccctcagaaatcgataggcatgatcttcccattctattcctcgtcgtgcaaaaggggttggctgctcaaagtgacaatccgtttttttgcggcaggattcggcagggcggatgcgcacatttcatttggcaccggcatatgataatacgaaaagaatcgatgaggtttttatgccagatatcagatatgcacagaacgagaatgtggatcgcggggatctcaggatgcaggtcatcgagcggggaaccagcacgccgatcgacgatgcaaaaatatcgatctcctattccggagatcccgacagcacggtcgaggaggtgaacacggatgcttccggaatgtccgaaacacttacgcttgatacgcctccgcttgaactgtcaatgcagccgagcgaggtgcagccttacgcggagtataccattcaggtcactgcaaaaggatatcgtccgatcaatatctccggcattgaggtcttttcgggtcagctgtcgctgcaggaaatccggatggacgccgagaaagccaccgaaagcatgaccgataacattgtcattcctgcacataccctttttgcggaatatccgcccaagatcgcggaagccgagatcaaacccgtcacggaaaccggagagatcgttttaagccgtgtggtgatcccggaatatgtgattgtacatgacggcgctccgagtgacccgacagccagagactactatgtccgttatcgggattacatcaaaaacgttgcctccagcgagatctattcgacctggccggacgcgacgatccgggcgaatgttcttgccatcatgtcgtttacgctcaatcgtgtatacacggagtggtaccgcaacaaaggctacagctttacgatcacgtcctccacggcatatgaccagaaattcatgtatgggcgcaacatttaccagagcatctcggatgtggtagatgagatgttccagaactatctctccagaccgaatgtcagacagccgatcttaacgcagtattgcgacgggcagcgcgtgacctgcagcaactggctgagccagtggggaagcaagtatctcggcgatcagaattatgagacgattgagattctgcgctactattacggcaataacatgtttatcaacacggcggaggaggtctcgggcatcccggcgtcctggccgagagtcgatctgtcggtcggatcgacgggagaaaaggtccggcagattcaggaacagctggcgcgcatctcgcgttcctatccggccattccgacgattacgccggacggaatctacgggccggcaaccagggaggcggtggagcgtttccagagtatcttcggacttccggtcacgggcgtgatcgactttcgaacctggtaccgtatttccgagatttatgtcgcggttacgcgcattgcggagctggtttagaggttggttttttccccggtttgtgatagaataagttacaaactggggatttttttggagaattttatggcgaattacaggatgacaatacagtatgacggcacgcgctacagcggatggcagagccagcatgcgacggacgcgacgatccagggcaagcttgagactgttctgacacggatgacgggacagcaggtggatgtcataggttccgggagaaccgatgcgggagtgcatgccatcgggcaggttgccaattttcatcttaagcagccgcgcgatacgggggagctgctggatggattgaaccgttaccttccggaggatattgccgtaagcagcctgacagaggtggacgagcggtttcacagccgctatcaggcagtgtgcaaaacctaccgctaccggattcatacgggagaggttccggacgtctttgcgcgcaggtatgtgtatgattacaggattccgcttgatgtggaaaggatgcgggaggcggcgggacttcttctgggggagcatgattttaagtcgttctgcggcaatacaagaatgaaaaagtccacagtgcggacgctttatgaaattcgtgtggaggaacacgaatcggagatagatctttttttcacggggaacggttttttacagaatatggtgcggattctgacggggacactgattgaggtgggagacggcagaagagagccggggagtatgacggacgtgcttgccaggagggacagacaggcggcgggctacacggcaccggcgctggggctggcgcttttctccgtggaatacgaaggcgacgggcagaatacgatggaacaggcataagtgaagatggaaaagtggtatgaaataaaaaaaggcgccgattttcaggcgattgcagaacggtttggcatcagtcccgtgacagcgcggctgatccgcaaccgcggggtgatcggtgatgcggcgattgataaatatctgaacggcacatgcagggatctgtatgatccgcatctgctttatgagtcagagaagctggtttgtatcctgtcagaaaagataaggcagggaagactgatccggatcattggagattacgacatcgacggcgtgatgtctacctatattctgtatcaggggatcacacgatgcggcggcagtgtgtcctgcgcgattcccgaccgcatgcgtgacggctacggcatcaacgagcatctgatcgatgcggcgtatgaggaggggatggacacgatcatcacctgcgacaacggcattgcagccatcaatgagattgcgcatgcgaaagagctggggatgacggttctggtgacggatcaccatgagattccctatgtggaggagcagggagtgcggcggtatctgcggagcgcggcggatgccattgtgaatccgaagcagcaggagtgttcctatccgtacaaagggctctgcggggcgacggtggcgtggaagattatacagctgctttacgagaagttttgtattgacacggaggaggcattcgcgtttctggaatttgtggcgtttgcgacagtgggcgatgtcatggaactgacggatgagaaccggattctggtgcgggagggattaaagcggctgcaccggacagcgaaccttggcatgcgcgccttgattttacagaatcagctgacgccggagcagatcacatcgtaccatatcggatttgtgcttggtccctgcgtcaacgccagcgggcggctggagacagccaaaattgcactgaatcttttcttgcaaaaaaacgagattgatgcagggaaaattgcaaaagaactcgtggaactgaacgcacagcgcaaaagcatgacggcagacggcgtggaactggcaaaacagatcgtcgacgagggaacagcgggcgagaaggtgctggtgatctatttgcccggggtgcatgaaagcctggcggggatcattgcggggagaatccgggagtcctaccacaagccggtatttgttctgacggacggcgaggaaggggtgaaggggtccggcagatccacggaagcgtactcgatgtatgacgagatgtgcaagtgccgggaatgtttttcaaaattcggcggacatccgatggcggcagggctgtctctgtgcgaggatgtggcggtattccgcggcaaaataaatgcctgctgtgaattgacagaagaagattttatacctaagataaggatagatatggcaatgcctgccgcgtatccgacgatcgggctgatccgggagctggcgcgcttagagccgtttggaaatggcaacagtaagccacagttcgcggacagggagcttgcgcttctgcgggcgtctgtggtgggcaggaaccagaatgtgttgaagctgtcccttatgacggcggcgggagaacatgtctctgcggtctattttggggatgtggaggcatggaagcagtattacagcgaaaaatacgggcagacggaggtggacgctgcgcttcgcggcagggcgaatgccatccggatgtcggtgatttactatccggaaatcaatgtatatcagggaatggagagtgtccagctcatcattcgcaactataaatagaacgtggcgggtggacagaaggagtagctatgtttagtggaaagagagaaaaggctttattagaagaggaacttgcggcattaagggagacggagaagcgcgagagggagctgctccataagatcgcaggtcagaaggataccgcggaggaacagtttgcacgcatgacagcctcgcgtgcacagatggaaaaagagatcgaagagatcgaacagcagatgcagcagaacggggagttgtcggagaacggcgcgcaggcggcgggagaacttcacaatacgttgatcacaatgaataacggaatcgcgacgttcgacgccaaccacagcgtttttatggagcaggtgaaggggcagaatgaaaaggtcgtcgagatcgtggagaacaacaagcactttacgacgccgatgaagcatatctcggaggctccgcaggcgcttcgcgagatgcgccaggcacttggtgagagggcagagcgcatggaggaactgtcgaaaacgatgggggtgctggcgctcaattctgcgatcgaagcaggaagaatgggggagagcggaacccggtttgtgacggcggcagagcaggtgcgtgcatatgcggacgattatgagcaggaggcgctggcgttaaaagaccagcttggggaggcggaagaacggatcgcgtctctggaggagcaggtacaccacttaaacgagctgctcaaggagaataatatttccatgggaaagctttaccgcgactgtgcgcagaatatggcggcttatgagaccggacagatcgggctgagggggctgatccaggatacggcggtcgcgagagcagatgtgctgcagcagtcggcggacgaaaatgtgcgcgccagggaggcattcctgaaatatgtatccggcatgcaggaggaactggcagagcagaagagcagcgcggatgaactggagaatgtctgcaagagcatcctgcagtcggcaggggaagccggatgatgccggttttgctgcaaaggatacagagcagagagtaggaatcagagagtataaataataaaaagtgagggaacaatgctatgacaaaagaaaaacagttcagttttttatcaaaggacggaaagacgaagattcatgcggtaaagtggatgccggagagcggagagtaccgggcggtcttgcagatcacgcacggcatggtggagtatattgaacgctataagccgttcgcggaatttttaaatgaccagggggtccttgtggtcggacatgatcatctgggacatggtgcgtcggttgcatccgaggaggaattgggatattttgcagagccggatccgagtgacacgctcgtcgaggatatgcacacgctgcgcacgacgatccagacagagaaccccggcgtgccgtattttatgatgggacacagcatgggatcttacatgctgcgcaaatacctgtgtattcacccggagggagtggctggcgccgtcatcatgggaaccggggcaatgccggatagcacgatgaagtttggactgtttttatgccgtacgatcgcactattccgtggatggcattacagaagccgcctgatgcagagcctttcctacagcaagccgtacaagcgctacgatttatatggaaaggattatgccaacagctggctttccaagaacgtggagaatgtcaaggcatactatgctgatccgcgctgtacttttctgtttaccgtaaacggctacaaaggcctgatggaggcggtattgtttgacaatcagatggagaatataaaaaaggtcccgaaaaatctgccgctgttttttgtatccggtgcggatgatccggtcggagatctgggagagggagttaagaaggtgtacgggatgtacaaagatgcgggggtttcggatattacctaccgcctgtacgaggatgaccgccatgagattttaaacgagacagaccgcgatcaggtcatggcggatattgcggcttggctgaacgtgcatgtggaactgtaatcttgccggacaggtttcttaaatttatataaataaaactactggagggaaaacggcggttgtttttaaggaaagttcgtagtaaaatagagacttgttttggaaggaggatttcacatgaaaaagaatggaatgagagttaccagtttatttctggctgcggtgatgcttgcatcggcgcctgtgacggcatccgcggcggatacatcagcgaatgtagagggagaggttgtcgtagaccagacaagtcaggatcagacttcagcagagtcgcagaatcaggcagggcaggatcagacttcggcagaggcgcaggatcagtcacaggcttcggcagcggagaacgctgccacgggagcaaacagtgataacgtgacaatccaggcggatgataagccatatcttgcgctgggagcggatctgacggatgtccagaagaatacggtgctttccctgatggggattgatccggcgaaccttggcaattatgatgtggtctacacaacgaatgcagaggagcatcagtatctggattcctatatcagttcctcacagatcggaagcaagtcatggtcttccgttgtgatcgtaaaacgcgataagggaaacggattaaatatttcaaccaggaatatcaattactgtacagtcggcatgtacaaaaatgcgttgacaacggcgggtattaccgatgcggatatcatcgttgcaggaccgcaggagatctccggcacggcggcgcttgtcggcgtattcaaggcataccaggagatgacaggtgagacgatcaatgcggatatcatcgacgcatccttaaatgagctcgtggttaccgggcagttagaacagtcgattgccggactttccgatgaggaagtggaagagtttatcgcttacatcaagtcggtcattgcacagaatgatctgaaagatgaggcgagcatcaatcaggcaattgatgatgcctgcagcaaatataatgtgacactgtcagattccgagcgtcagcagatcgtggatctgctcttaaagattacatctctgggaatcaatcttgacagccttgtggattatgcggagtcactgtaccattcctttaaggatggcggaggagacagcagcgtgctctcgagcgtaggcacatttttctcaaatgtattcagctcgatcgcggacttctttaagggattgttttcgtaaacggaggagaggaaggaatctatggtagacagaaagagacggctggattgcgcgaacggaatccggaaagcagacattgtattaaagcacggcaaagtattgaacgtattcacggaggagattctggaagcggatgtggcaatctgcggcgatacgatcgtgggagtcggttcctacgagggcgagcgggagatcgactgtaccggaaaatatctggtaccgggatttctggatgcccatatgcatattgaatccagtatggtatctccgggcgaattgtccaaggtgctggtgcaggcgggaacgacgaccattgttgcggatccgcacgagattgtcaatgtgtgcggtgtgaagggaatggattatttcctgaaatgtgcgggcaaggcgctggtacatattttcttcatgattccgtcctctgttccggcaaccgatgtggagacaaacggatgcggggagtttctggcgtccgatatgatgaagtatgtggatgatgcacgagtgctgggactcggggagaccatgcgttttgtggagtgttaccagggcgagcgccggatgtcggataagctggaactttttgcaaagaagcacatcgacggacatgcaccgggcattacaggaaaggcggtacaggcgtaccgtctggctggcgtggagaatgatcatgagtgtgcgaactccgaggaagtgctcgacaagctgcgcgccggttttcacatctatatccgtgagggaagcggtgccaagaatcttgaaacgttaatccgcacgcttttagatgccaatgtggcgctcgaccagtgcgcattctgcaccgacgataagcatatcgaggaaatccgcaaggaaggacatatcagcacctgtatccgcaaggcgattgcacttggggttccggtggcaaaggcatacaagatgggaagctaccagccggcaatgttttacgggcttaagggatacggtgccatcggagccggatatcacgccgacattgtgttcctcgataatctggaggaggtgcgtccgaccgatgtgatgaaggacggcaggatcctgggagaggaagactataagaaagattattgggttccagtgccggaggaactgcttcacacggttcatgtcggggagctttccagagagcggattcagcttgcatgcaacggaaagaccgatgtgatacagatgaatgcgcatcagatcgtgacgacgcatctggtggaagaagtgccgacagaaaacggatattttgtcccgaatgaagtatacaataagatctgtgtggtggaacgccacggcaagaccggagagatcggtgtggcaccgctcaagggctttggcgtaaaaggcggtgccgtagcgacgtccgttgcgcacgattcccacaatatgattgtggcgggagacaatgacgatgacattctgcttgccatccggactgtggaggagcagcagggcggctatgcgatcgtgtccggcggcaaggtaatcgatgtactgccgctgccgatcgcgggtcttatgagcgacagacggtatgaggaagtcacggaaaagctctctgccatgcagaaggagacgagagaacttggtatctcagagaatgtagatccgtttgttaccctttcttttatggcgcttacggtaatcccggagatccgtgtcacggagcgcggtgtttatttattctgatgaacagattatgaaggagatttatgcaggaaaagattcaaattatcagtgacgggtcgttagacctttcaagagagctcacaagagagcgcgatattctggtggtgcctttctatgtatcttttgatggagaaacttatctgaaagagggggtggaactggatatccgcgagttctatcagagaatggtggatcatccggatgtatttccgaagacgtcgatgccgtcggtggatgattattatcaggtttttctcccgctcgcaaagcaggatgttccgatgatctgtatctgtatcacgacgaagttcagcggctccatgcagtcagcgacgactgccagagatatgattttagaggaatatccaaaggcgcgcatcacagtcattgacgcagagatcaacacggtgctgcagggcttgtatgtacttgaagcatgccggctgcgcgacctcggctgggagtatgaccgcatggtgaagaggctccttgccataagggagagcggcagaatcttctttacgatcggcaacattgattacttaaagcatggcggaagaatcggaaaagtgatgggaattgcgggaagcgcgttgaaaattaagccgctcatcacactgaaggagggcgagatttttgcctccggcattgcgcggagccgggaaaaatccatgcagaaagtaattgagatgctcaaggcttatctggacgaacgcaccgcaaagccgggcgaatacagttttgccatcggctatggctatgattatgaggaagcctgtcattttcgtgagatgttaaaagatctcgtgagggagcgcctggggattgatgagattgagatttaccagatcggcgcaacgattggcgttcataccggaccgtatccgatcggcgtggggattatcaaacgcgcggactgggaagcgtagggcagacagaagccggagataaagcgaatcaaaaatgtaaatcgtacatgttgtgtaagcgttacacatgcatgtacgattttttgattcataggagaatcctgcaaacaggattctttttttggaaaataaatgtatcatttttttgaataataatattgacaatactatattatatgatatatagtattgataacaaaataatattataaacatataaataatatcagacagaacaggaaaggagccggtaatatggtgttcaatacaggtgcagccctgctggatgcgattgttctggcggtcgtctccaaggaggaggaaggcacatatggatataagatcacacaggatgtgagggtggcgattgatgtttcggaatccacgctctatccggtattgcgcagacttcagaaggatggatgccttatagtgtatgacagagaatgtggaggacgcaacaggcgctactacaggattacggatgagggaagaaagaagctggacgattatcgcagagaatgggatgactattcttcgaaaatatcagagttattttccgaggagggagtttgaagatgaacaaagatgaatttttaaggcagctggaagtactgctgtcagggatttcacaggaggaaagaacggaggcgcttgcattttaccgcagttacttcgaggacgccggagaggcgaatgaggcaaagatattagaagaactggaatcgccgcagaaagtggcggacagcattatcaaagatctgggcgtgcaggccggggaagcgggagcatccggtgcgcagggggcggcgcagggaagtccggcgggagcagtgacgggagcgggctggaacccggcagcgcagggaagcccggcaggagcagtgacgggagcgggctggaatccggcagcgcagggaagtccggcaggagcgggctggaacccggcagcgcagggggcggcacagaatgcagcatattctgcgcaggagaaggatggaatgccaggctgggcgatcgttcttctggtcatcacttcgccggtgtggctggtgatgattctggtcatactgtcagcattgctcgggattgtggcggcgctgtttggaattgcaatagcggttgtggcagtcatgggagcactcctaatctgcggtgtggtgatctttggtgcaggaatcggaagtgcatttgcaggaaatcctgcaatcggaatcgggcttatgggagcaggactcatcgtgctggcgatcggtattcttgcggtggtactcgtggtatggatttttggaggatttctgccatgggcattgagaggaatctggaagctttgcaaaaagccgtttaataagagaaaggagcgtgcggtagcatgaaaaaattttcaaaaatctgtctgatcattgtggcagttctcgggggaatgggattattgctcggcagcatctccactctgcttggcggcggttttggagcagtcagacgaatggcgcaggcaggagaattcgatgcgggcaactggcatatccggccggacggagtctattattcttcggatgaggacacggaggatgaacggtggtccgacagtggcacaggcagcggctggacggatggcgcagtctacacttatgaagcggcaggcataaagaatctcgatgtggatattgatgcggcggaaatttgcgtcaaacaggggacggatgcagacaatctggtggtgacaacttataactgcaaagaaaaatactatatggcagataaaaagaacaacacgcttcagatacagtacaatttgcaaaaccagattccggtcaattccagtgcgacaattgtgattgagattccggagggaatgacgtttaatacgatggatttcgcaatcggagcagcagatgcggattttgcatcgggcagcgtgaactgcaggaaactgaatctgaatgtgggcgccggagaactgacgggagaggacttcatagtgaaagaaaccatggaggttaagctgggggccggtgatgtggaactgagcggaggtacttacaaggatgtgaagatggactgcggcattggctcctttgatcttgatgatattactgcagaaaatgtgaaggcacattgtggcatgggagacggcaccatcacgatgcttggcaacgaagaggattacaattacaagatgtcctgcggtatgggggatctcatggtaaacggagaaagctatgccgatctcagcggaagctacaaggtcacaaatccgggagccatcggaacgatcgatcttgactgcggcatgggaagcatagattttgatatagaatagggaaaaagaaacgcgcgtcaaactggcaggctggtctggattggcgtgtgaaaaacggatccgggtccacagaaggaaaaagcgactctgagacccggatttgtgcaaaaaacgggtctggcagaggaaaatatccgctctggacccgttttgcatgggaaaagtgccattttgacaggaaaatgaggaaaaatgggcctaaaacaaggaaaatccgctctgggacccggcttacagctgtttcgtggattgtttccggtaatcccggggtgtcatgccgaatcttttcttgaaagtgcggttaaagtacgacaaattttcgtagccgacttcctccgcgatggcaagaatcgaggattcggaggagatcaacagccgggaagccatggtcaggcggtattcattgagatattcaataaaggaagtgcccattgtattcttgaaatacttcatgaaatgcgactggctcagcccgacctccgccgagatatctgcaatcgtaatgcgctccatataatggttctccagatattttaagatcagcttcatcttctccagcgatttgtggtcgcgctttgccggctcttttaagaggcatttgctgaataaaatgtaaaaaagcataaagagctgactcttaataaagaactgatagccgggcgggtttgtccggctgatttcatcgttggcgtcaatgcaggcggcaatctccgcatagcagggagatcccggctgatacagaagcggaacggacagggcgcccgacaacagcggtgcaagaaattcggtattgctggtgtccgcctttttggaaatgaggatgcccggatggaaaatgatattttcgtattccatgctttcctgcatgtactgttcaatgccgtgcagcctgcccggcagaatcagcgcgatggttccctcagtcaccacgtaggatttgaaatcgaccgtgattgctccggttccttttttgatatagatgatttccatctcatcgtgccagtgcagaggcacgcgcgaaaagtcaagcggaatcgagcaagggtaggtgatataaggaaacagcgggttgccatgtggaattttttcctgatagttttcatactctaaaatgttcatgataggattgtaccacttttggggataatatgacaagaaaaaaagtggacttctgcatataatgttctcatacagcagggaaatacaaaaagtaattggggatgcaaaacaaggagtaaaatcctctcctcgtcaaaggactcggattttgcttcgcaaaacaaggaggattcacatgaacgtacaggaaatcgtaaacaacagatacggtaagggcattgcacagtgctccaacgaagagatttattacgcgctgcttgagatgacaaagagcatggcgaaggaaaaggagagcaacgagggaaagcgcaagctttattatatctccgccgagtttttgatcggtaagctgttatccaacaacctgatcaacctcggtatttatgaggaagtaaagcaggttctggcggagaacggcaagaacctggcagagatcgaggaggttgagccggagccgtctctcggaaacggcggtctgggtcgtctggcagcatgcttcctggattccattgcaacgctcggattaaacggcgacggcgtgggtctcaattatcactacggtctgttcaagcaggtatttgagcacaatttacagcacgaggagccgaacccgtggatcgagaaggagagctggctgacgaaaacgaacgtgacctacccggtacagttcggcggttttaccttacagtccagactgtatgatatcgatgtgattggttacgagaaccgcaccacaaagcttcatttgtttgatgtggagaccgtggacgagagccttgtgggggacggcatcaattttgacaaagaggatattgcaaagaacctgacgctgttcttatacccggacgattcggatgacaagggacgcatcctgcgtgtataccagcagtattttatggtcagcaatgcggcacagctcatcattgacgagacgctggcaagaggcggtgatctgcacaagttgaatgagtacgcggcaatccagatcaatgatacacacccgagcatggtgattccggagctgatccgtcttctgatgcagcgtggaattctgatggatgaggcgattgagatcgtatcgaagacctgcgcatacactaaccacacgattcttgcggaggcactggaaaaatggccgattcattttttggaaaaggcagttccgcagcttcttccgatcatctacgaactgaacagccgcgtggtgcgcaaatacgatgacaagtcggttgcgatcattgatgacgagaaacgtgtgcatatggcacatatggatattcattacggttacagtgtcaacggcgttgcctacctgcacacggagattttgaaaaatacggagctcaacaacttctacaagatctatccggagaagttcaacaataagacaaacggcattaccttccgccgctggctgctgcactgcaaccacgagctggcagatctgatcgaatccctgatcggaccgggctttaagaaggatgcgatggaactggagaagctcggtgcgcttgtcgatgacgcttccgttctgcagcgtctgctcgatgtcaagagcagcagaaagaccgagctgaaagattaccttgcaaaaacacagggaatcgtgctggatgacaattccatttacgatatccagatcaagcgtctgcacgagtataagagacagcagatgaatgcgctgtatgtcatccacaaatattttgagatcaaggcaggaaagaagccgacccgtccgatcactgtgattttcggtgccaaggcagctccggcttacgtgattgcaaaggatatcattcatctgatcctctgcctgtccgaactgattgcaaaagaccctgaggtatctccgtacttaaaggttgtgatggtagaaaattacaatgtcacgctggctgaaaagctgatcccggcggcagatatccatgagcagatttcccttgcttccaaggaggcatccggaacatccaacatgaagttcatgttaaacggtgcggtagcgatcggaaccatggacggcgcaaatgtggagatgcatcagtttgtcggtgacgacaacatttacatcttcggtgagtcctccgaggaagtcatcaagcactacgagaaggcggattatgtgtccagaagctactatgagaatgatgcgaacattaagcgtgcggtagactttatcgtcagcgacgagatgatggcagtcggatgcagagagaacttagagcgtctttacaacgaacttctgaacaaagactggttcatgacgcttccggatttcgaggattatgtggcaaccaaggagcgcatctatgcggattatgaagaccgcatggcgtgggcgaagaaaatgctcatcaacatcagcaaagccggattcttctcctctgaccgtacgatcgcacagtacaatgaggacatctggcatctgtaaaaccggggaaaaccgcccggaagaaaaagcttgcttcaaaatttatatatttctttcacagagaggagtgccgcaaggcgctcctttttgtatgaaaacagtggaaacagagaaaatgctgtacaaaatccggcggccggcatattgtataaagtccgcgggttctttataataagaaaaagacagggcagcagtctggaaaataagaaggaactctgcccggaaatggagaaaatgatgcgttatattgacatgcattgtgatacattgggaagcgcgttagcgcagaaaacagagacgtttctggaacttgaccgcacgatggtggatggactgcgcctgcagcaggcagaggcaggagcgcagttttttgcgatgtttctgccgcagagaaatgatccggactggttcggcttagaagagatgccgtcggcggaagtactcatgaggaaaatgtatgacattttctgccataccatggagcagtacggtgaccgctttgctgcagcgcacaatgcagaggaattaaagcagaatcagaatgaagggaaaatatcggcgtttctcacgattgagaacggttctctgattgatgggaaaatggacaaaatccgggaaatttacgatctcggcgtaagacttgtgacactgacctggaatgacgacaactgtctgggacactgccattcccaaaagccggaggagatgagccgtgggctgaccggatttggtaaagaggcagtgcgctatatgcaggaactgggaatcttagtcgacgtctcccatttatccgacggaggtttccgggatgtcgcagaagcgtcccggcgaagcggcgtgccattcgtggcatcacattccaactgccgggcactggcgccggcaacgcgcaatcttactgacgcaatgatccgcgaactggcagagtgtggcggagtggcgggactgaatctggaaccgacctttctgaatgaggacgagacggataaggtcagccgtatcgagcgcatctgcgaccacgcaatgcatctgattgacaggggcggtatcgaatgtgtgggactcggcacggactttgacggaatctcaggcgaatttgagatcagtgactgcacgaagctgccgctgcttttcgatgcgctgcgaaagagaggactctccgaagacgccgtggagcagattgcctatcaaaacacggcgcgcgtgattcgggacggcatgagatagaaaagtcatgtacctggaagatatcgcttgatgcagcgggaaatcaccttgcggggaaggaaaatatcgtttatactttttggtggcttcattatagtaaaaagaggaattaagatgagaagacgaatggaaatcaatcaccatagaacatacaggggaaaagcggcggtgtttttgcttgtgacagccgcgcttcttgccggatgtgcgaatgagcgcacggaggatgagctttcctaccgcaagattggcatagagagcatgcagagcggggattatgagggggcactggcggcatttgacggagcgcttgcgtgctgcaccggaaaaattaccgatctggagatcgacatctgctattacaaggcggcagcccagtatgccgcacaggacactgagggagcacttgagacgtacaacgccatgattgattatgacgggaagaacgccaatgcttactatctgcgcggatgtttaaagcttggcaccggggatacggacggggcgaagcaggattttgcggacgcggtcaagtataaccattcggattatgaactttatatcaatatttacaagaatcttgccgcctatgatctggcggaggacggcacggcgtacttaaacgatgcgttttccatcaagggaaatgatgcggaaagtcttgcatacagaggggagatttactacctgctggggcagtatgacaatgcaatcaaagaattgacgtctgcgatcgatgcgggcagtgcggaggcgaatctgacgcttgcgcaggtatatgaggcgcagcaggacacggcgaacgcgcagacgtattatcaggcttatgtggatgcgggtgtcgcggattcggaagcgatgaatgcattggcacagattgagatgggcaagctgaattatagcggtgcgctttcctacatcgagcaggggctttcgatggagagtgttccgaacaggcgcgcgctgctgcagaatcagattatctgcatggagtataccggagattttgcgggagcttatgaggtgatgaccgcttatacagccgcgtaccctgatgatgcggaggcactgcgtgaatacacattcttaaaaagccgggtggatacgccggcgggcacagaagtgcagggggaagtggtcgtgacggaggatagtggaaccgataacgcaacggacggaaccgacagcggaacggacggaaccgacagcggaacggacggagcggatgccggaacagacggaagcggagacagcggacagtagaaaaggagcagcatggcagaaattattgaattggaagatcagatcgaaaaggtgattctggtcggcgtgagcgagcaggatggggatgatgccgaggactctgtggcagagctggcggagcttgtcaggacagcgggagctgtcgtggtcggcacactgatccagaagagggaactgatgcacccgggcacctatgtgggaaccggaaaagtggcggagatcgcggcgatgatcgcagagcggggcgcgaccggcatcgtctgtgacgatgaactttcaccggcacagcttaagaacttagagcagatgttagacaccaaggtgatggaccgcacgctgattatcctggatatctttgcggcacgcgccacgacgagcgagggaaaaatacaggtggaactggcgcagttaaaataccgcctcagccgtctgaccggcctcgggcgttccatgtccagactcggcggcggaatcggaacgagagggccgggtgagaaaaagctggagatggacagacgtctcatcaaagaccgcatcgcacagctgaaccgggaattaaaggaggtgcgtcagcaccgcgagatcacacgcgcgaagcgcacgagaaacgggatgcctgtggcggcgatcgtcggctacacgaatgccggaaagtccacactgttgaaccggcttaccgacgccggggtgttagaggaggacaagctgtttgccacacttgacccgacaacgcgcgtcttagaacttccgggcagacaggagattcttctgaccgatacggtcggttttataaggaagctgccgcaccatctgatcgaggcgtttaagagtacgctcgaggaggcaaaatacgcggactacattctgcatgtggtggatgcttccaacccgcagcacgagaagcagatgcacattgtctatgacacgctctatcagctggatatccgggaaaagacggtcatcacgctttttaacaagcaggacgcggtgacggagcgggagccgctgcatgatctgagggcagatcataccctggcagtctcggcaagagagggaaccgggttagatgagttaaaagaactgcttgcggaacttctgcgcgagaacaaagttctgattgagcgaaccatcgcctatgcggatgccggaatcctgcagcagatcagaaagcagggagagcttttagaggaggattaccgcccggaggggatctatgtgaaggcgtatgtgccgctggaattgtatggaaaactgtaggcggatatgataagatgaactcatacaatggaggaaaaaaagatgaccatattgatcaaaaatggacgcgtaatcaatcctgccaccggaacggatgagacactggatgtgctggtggagaacggggttgtggccagaaccgagaagagtatcaaggaaaaatgcgaccgcgtgatcgatgcgaagggctgctttgtcatgccggggtttatcgacatgcatgtgcatttaagagatccgggatttgaacagaaggagacgatcgagacaggcgcaagagcagcagtgcacggcggatttacgacgattcttgccatgccgaacaccaagccggtcgtggataatccggatgttgtgaactatgtgcacaacaaagcaaagaccgtcggcgctgccaacgtgctgcaggtcggtgcggtgacgaagggacagcagggaaaggagctttccgacatcgagggcatggtgaaagccggaattcctgccatcagtgaggacggcaaatccgtcatgaatgcacagctttacagagaggcgatggaacttgctgcgaagtacaacattgcggtgcttgctcactgcgaggacatcaatcttgtcaacggcggtgtcatgaatgaggatgtcaacgccagagaacttggacttggcggcatcacgaattccgtggaggacatcatcattgccagggacatcatgttaagccgggataccggggcgagactgcacttgtgccactgctccacgaaggattctgtcagcatggtcaagcatgccaagatggagggaatccatgtgacggcagaggtgtgcccgcatcattttacactgacttccgatgacatcaggaagatcgagccgaccgtggatacggagaaaaaagtggcgatcgaggcggatgcggacacgaattacaagatgaatccgccgctgcgcacgaaggaggatgtacaggcgttaaaagagggactgcgggatgacgtgatggatgtgatcgcaaccgaccatgcgccgcacacgtttgaggacaagaatacctccatgaaatccgcaccgttcggtattgtgggtcttgagaccgccgcatgcttaacgtacacggagcttgtactcggcgggtatctgacgccgatgcagatggcggagaagatgagttacaatccggcgaagattatcggaatcgacaagggagatattgagcctggaaaggtcgcagacatcgttatttttgacccggacgagacgtacgtgattgacaagaacacgtttttcagcaagggcaggaataccccgtttgacggcagaaaagtcaccggtaaagtgcgaatgacacttgtgaacggacaagtggtatatgaagataaggaaaaataaaagatcatgcatacaacacaacagaaatttgaagagacggcaatcataatcaaacaggaagagattgcggacgatatttacagcatgtggctgcacaccgagcagatcgcggcgcatgcaaaggcagggcagtttgtatcggtctactgtaaggaaggcagcaggctgctcccgagaccgatcagtatctgtgagatcgacagaaaggacggcgcgctccgtctggtataccgcgtggcgggaaagggaaccgaagagttttcttccatgcacaccggtatgcagcttaaggtgataggaccactcggcaacggctttccgaagcaggagaaaaaggcgtttttaatcggcggcggcattgggattccgccgatgttagagctcgcaaaagagttaaactgcgagaaacagattgtgcttggataccgggatgagctgtttctgctggatgagttccgcaaacagggagaggtctatatcgcaacggaggacggcagtgtgggaacggagggcaatgtgctcgacgccatccgcgagaacgggctgaccgcggatgtgatctacgcctgcggaccgcttccgatgctccgcgctttaaaggagtatgccgcaaaggaaggcatcgaatgttggatctccatggaggagcgcatggcgtgcggcatcggcgcctgccttgcctgcgtctgcaagtccacagagaaggatgcgcattccaatgtgaagaacaagagagtctgtaaggaaggaccggtatttcgggcagaggaggtggatttctgatgaatcttggcattgatctgtgcggtgtcgcactgaagaatccggttatgacggcatccggcacgttcggttccggggaggagtattcggagtttgtcgatttgaataagctgggagcagttgtgaccaagggcgttgcgaatgtgccgtgggaaggaaatccgacgccgcgtgtggcggaggtctacggcggcatgctcaatgcgatcggtttacagaatccgggcattgatctgttcattgacagagacattccgttcctcaaaaaatatgacacgaagatcatcgtcaatgtctgcggacatacgacggaggaatacattgatgtggtggaacgcctctccgaccagccggtagatctgcttgagatcaatatttcctgcccgaatgtaaaggagggcggtattgcgttcggacagaatccgaagatggtcgaagaagtcacaaaagagatgaaacgccatgcaaagcagccggtcatcatgaagctttccccgaatgtcaccgacatcacggagatggcgcgtgcagcggaagcgggtggtgcggatgcactctccatgatcaatacgatcacaggaatgaagattgatattcacagaagatgctttgcgctggcaaaccgcacgggcggtatgtctggtccggcagtgcatccggtcgcggtgcgcatggtctaccagagtgcgcaggcggtaaagattccgattatcggaatgggcggaatccagacggcggaggatgccatcgagatgattcttgccggtgcgaccgcagtctcggtcggtacggcgaacttctatcatccgcatgcgacggaggagatcgttgacggaatccgcgcctacatggagcgctatcaggtggaggatatccgggaactgatcggagccgtccatgaccggtaggatccgtcggacaccgaaaatatcagagttacgctgggagatggattcataaggtgagagaaaaaatatttaacattatccagattggagataagagtaaccggatcagccgtgcgttcgatatttttatcacaattacgattgtctccaatattctggttacatttttacagacgtttgaggaactggactttctgtccggtttctttttcgtggtggaggtcatcacgctgtttattttttgtgtggagtatgtgctccgcatctggacggcggatcttttatatccgggaatgcgcaaatgccgcgccagactgcgctttatggtgtcttttgacggcgtggtggacattctgaccattgttccggtgttctttttgtccggatttgtgatctttcggatgctccgggtggcaagaatctttcatctcttccgcctgaatgcaagatatgattcatttaatgtcatcacgacggtactgtacgagaagcggaatcagatcatttcctcggtgtttatcgtggtgatcctgatgcttgcgagcagtctgtgcatgtacagtgtggagcatgacgcgcagccggaagtgttccgcaatgcattcagcggcgtctggtggagcatgtcaacgcttcttacggtcggatacggcgatatttatccgatcacgacgctggggcgtctgatggcgatctgtattgcgtatctcggcgtcggcgtggtagcgatcccgaccggtatcatcagcgccggattcgtggagcagtatcagagaaagagcagcatctcaaatatccgagatgcggacatcaaggagattgcggagatttttgtggacagaagatatgcgggaaagaccgtgggagaagtgcaggatgagcagcagctgacggtgtttttaattctgcgcgacgatttatccatcctgccgcagaaggacacgctcttaaagttaaatgacattattgtgatacgcgggagaaaaggcgtatcgtaaaggaggcattcgtatgtggattttctatgcgtttggttctgcgctgtttgcgggacttacgtcgattctggcaaaatgcggcatccgccatacagactcggatgtggcgacggcgatccgcacgatcgtggttctcattttttcgtggattatggtgttcgtcgtgggggcacaggacggcattgcggctgtgtccggtaagacatggctgtttctgattctctccgggcttgcgacgggagcatcctggctgtgctattttcatgccttgcaggcaggtgacgtgaataaggtggttccgattgataagtccagtacaattctgaccattgtgctggcgtttctttttttgggagaggaagtcagcgcgcttaagatcgtgtgcgtcatcttaatcggcgccggtacctttcttatgatccagaagaaggagacggaaaagagcgcggagcaggagaaaaagagctggcttttgtacgcctgcctatcagccgtttttgcaagtctcacttcgattctcggcaagatcggcatcgagggactcaattccaatctcggaacggcaatccggacggcggtggtgctcttgatggcatggatcatggtatttgcgaagggcaagcagaaggagattggcaggattgacaggagggaacttggatttatctgtctgtcgggacttgcaacaggcggttcctggctctgctattacaaagcgctgcaggacggacttgcgagcgtggtagtgccgattgataaattgagcattcttgtcacaatcgctttttcctatctggtattccatgagaagctgacgaaaaaggcggcgtttggtcttgtgctgattgtggcgggaacacttctcatgattctgtaacggttgtttagaaaatgtttaacttttttcgagatgctgtttaggcgtggctcctagaataaacgtatcgcaccgggataggtgcatggtgccgaaagttacgagacggcgcagaaaagaggaaaacatgttagaacagctgatggatctggacagtggatttttgatgtacatacaggagtttatgagaaatgatgcggcaacccggactttccgcggaatcacaacgctgggaaatgcgggggcggtctggattgcaatttcactgctccttctggtaccgaagaaaacaaggcggatcggctgcatggggctgctggcgcttgtgctgtcgctgcttttcaacaatatgctgttgaaacatctgattgccagaagcagaccttatgactgcatccgcggtctgattccgttgattacgcctccgacggattactcgtttccgtcggggcacacggcggcatcgtttgccgtgggagtgcttctgttccggaaactgccgaagcgctatggaataccggcactcgtacttgctgcactgatcggattttccagactgtatctgggcgtgcattatccgagtgatgtgcttgcgggagcgctgcttggcaccggaatcagctatgcggcggaagtattctggcttgcggcagaagagattgtgaaaaaacacaggttttgtaagaaaagggagacggcacacgaatgacgatcaggaaaaaactgttttggacaaacacatttatggtgcttcttgccatgctggtgctgcttggaatcggcggatcgatgatctgcctgttcaaggatgaatttctaagatggtacggcagccactcacagcttgcggacagatacacggaagtgtatgccgggttcccggaggtgttagagagtgacagctgggatggcatggcggaacaactgaccgattatggcttccgccttattgtgatcgatgaggacaggaattttgtctacaataacgcaaagcacagtgaggaggagggaacggaggctcttttttatacgccgaacgatgccggaaagattacaacctaccttgtggagagcacgaccgtgcttgcaaccagggtgacagtggacgacaacttttatgacatctacgcggtcaactgtccgagtgaactgtcattccgggggatggaccgcggaatgtttgagatgtttattgtcgtcttcctggtggtgggaattctggcaatcggcggaattctgctgctcagccagattttctcgcgcagacttatccggcatatcctctcgccggcggaagcactcgacgtcgccgcaaagcgagtcatggacggagaactcaccacaccgatcggctatccttacgaggatgaatttaagggcgtgtgtgacagttttgacctgatgcaggagcatctgagggaagagatggagaaaaatgccgcctacgagaaggcaaggacggaaatggtaagcgggatttcacatgaccttcggacaccgctcacgtcaatcaagggttacgtgaagggaatgcttgacgggattgccaacaccgaggaaaagaggacggaatatttaaagattgcctaccggaaatcctgcgatatggatgtcctgctctcaaagcttttttatttttcaaagctcgagaccgggaatatgccgttcttcttccgcgagtgtgatgtcgagaggttcttgcgggactatgtggaggaaaaagagccggaatttacggagcggcggattgcggcggaggttgtcagtgacttaaaggctccagtatacggcagccttgacacggagcagatgatccgggtatttgacaatctgatggagaatgcctgcaaatatgccaaccggcccgatgatctgcggatttccattcatattgcggaaaatgacggatggattgtcgtggattttggcgataatggcgacggtatggagcaggaaaaactgggcgcggtctttgacgagttttaccgcggggatgagtccagaagcagcgggtgcgacggaaacgggctgggactttatgtatgcagatatatcataaaggagcacggcggaaagatccgtgcctacacgaaagacggatttcatgtggagatgtgtctgccggaggcggcggagcacgagaaggaaaaggccatgccggaagagggcagggagtgaaaagaaaaggccatgccggaagagggcagggcgtgagaagaaaagccatgccggaagagggcagggagtgaaaagaaaaggccatgctggaagttggcagggcgtgagaagacagatggcggatgacgcggggaggaaacgatgatggcacgcattttgctggcggaagatgacagggaaatcgcaaatctggagcgggattatctggagatgagcgggcatgaggtggtgatcgcaccggacggagaagaggcaatgaagcggatcaatgaggagaagtttgaccttctgattcttgacatcatgatgccgaaaaagagcggatatgatatctgccgtgagatccgggagcagattgacattccgattctcatggtgacggcaaagacggaatctgtggacaagatccgggggctcggtctgggagcggacgactatattgtaaagccgtttgaccctatggaactggttgcgcgcgtaaaaagccatctgctccggtatgagcgtttgaccggcaagcatgagatggcacaggaaggaaaagagtacgatgccgatgactactgcattgaggtcggcggtctgaagattctgaccaaaagctggaaggtcattcgtgacggtgaggagatccattttccgaaccgggaatttgaactgctcaagtatctggcgatgaaccccaacattgtattttccaaggagcacctgtttgagcggatctgggggtatgattatatgtcggacagtgcaacggtgaccgtgcatatcaaccgtatccgtgagaagattgaggaagatcccaagaacccgaagatcatagagaccgtgtggggtgcagggtaccgcctcaatatgaaatagcacgcaaagtttccgcagatgcgaaaatgatagaaatgaaataatgaaaagaccccgacggggatggcagagatgtacatcgccgccggggtttttgcgtttcccgattttgtgtttcccgatcgaccgaaccgtttagaaattgtttagaaattgtgtgcgcttcgtttaaggttatcccttatgttaagagaacagagaaaaacttaaggattctttggaaaaactttggaaatttctgcacgaaatgtttaactgcaggcagtatcgtagagagcagatgatgaagcgaaagagaaaggacggtttgacaaaatgaaatatattacatttacggtgccgtgttacaattcggctgcatatatggagcgctgtgtggattccctgctgatcggcggggaggatgtggagattctgctgattgatgacggatcgaccgaccggacgggggagatcgcggacgaatatgagcgaaactatccgggaatcgtgcgtgcggtacacaagtcgaacggcggacacggctccggcgtcaacgcgggactgcaccttgcgacgggctgttattttaaagtggtggattcggatgactggctttcggaggatgcgtaccgcagactgcttgcgcgcgtgaaggagttctgcacgggagcggtggcagaacttatggatcagccggatctgatcgtgtgcaattatacttacaatcacctggaggagggaacggcgcacacgatggcgtaccggaatgtattcccggcggaaacgccctgtacctggaatgacatcggacatttcagaccgtcccagtatctgattatgcatgcgctcatctaccgtacatcggtgctgcgcgagacgggagtctgcctgccggagcacacgttttatgtggataatatttttgcgtatcagccgctgccgtatgtgaaaaagatttactatatggacatcgatctgtaccagtattttctgggaagagcggatcagtcggtgaacgaggaagtgatgatgcgccgcattgaccagcagattaaggtgacgaagattgtggcgtcctgcgtcgatctcgacgaggtgcggcagaaatatccgaagcttgccgtctatatgtgcagaaatatttccatcatgatggcaatttcctccatccatctccttctgatcaacgaccgcgccgcgttggagaagcggaagcttctgtggaataccatccgtgaggaggacaaaatgctctacctcagattgaagtacacgacgctgagcggatttacctatcttccgggaaaagtcggagggaagattaccgtgcaggggtatcgcatcgccagaaaactctatcagtttcaatagacgggagaggattacatggaaaagatatacattgcattcgtggacacgccgggactgtttgcgtcggcgctgcacggatatttgaagcagaaatatattcatgttttactctcgctcgatgaaaatctggatgaggcgtacagttttggcaggcgcaacccggcggttccgcttgtggcagggtatgagcgggaggataaggagcggatcctgcgctctttcccggatgcggattacatgatcggagcgatagactgtaccgcggagcagaaggaacagatcagggaaaaaatgcggctttggtatgagcatcggtggcggtatcactatgcggtgatggagcttccgtttatcgccatgggacgtgccgtacaccggagccggcattttacctgttcttccttcgcggcaaagtttctttcggacgccgggatcacatcgtttgcgaaggatgaatcgcttgtgacgccgaaggatttttatgagtgggatggatatacctgcattttccgcggaaaattgagagaacttgtggaggaggagcccgtgcgggagcgcgcgatgctgcttgcaggaacggagacagtgtatgaaggatagaaaaaagatatttgaggcagtgttttttatcacggtcacggtgctggcgctctcggttctcttccggggacagaactggtccgatcttcttttactgataagaaaaagcaatcccgtctgtctgctttctgcagtgtttctgggattgctttttgtctgcctggaaggttatatgatctggcggcttttgcggctttcgggcaatgacgccaccctgccggggtgcatccggtattcgtttatcggatatttttattcgggcattacaccgtccgcgaccggcgggcagcccgcgcaactctacgagatgtgcaaggacggaaacaatgcctccgacagcacggtcgttctcatggtggtggcgctgttttacaagctggttctggttgtgatcggcctgatgctcccggtggtctggctgggacatatgagggagtatctcggctcctggctcggactgtacgtggtcggaatcgtgttgaatgtcgtgctcgtggcgctgctgtgcggcgtgatgttttcgccggggctgatccttaatatcatgtgcggcgtattggcggcgggagagaggtgcggcatcgtaaaaaacggggaaaaactgcggcaggacgcggcggcttttgcagggcggtaccgtgagaccacgcattttttaagagagcacaaaggggaactggttgtgattggagcggtgacatttttacagagaagcacggtgtttctgatcacggggatggtgtaccttggcttcggactttcggggagcagtctttttcacattctggcagtgcaggcggcggtgtacattgcggtggacatgcttccggttccgggtgcgcagggaatcacggagcttatgtatgcggcggtgttcggcggagtgtttggcgcacagtatgtgaaggcgtccatggtgctggtgcgcggcatggatttctatgtgccgttttgcgtcagcatgctcatcgtgcttgctgggcacggcgtttcatatgtgagaagacaaaggaaacgtgcataacctcaggagtgaaactgtgcgtactttttcggagagatgccgactgcttttgtgaaggcacgcagataattgctgtagtcgttgaagccgcaggcttcgcaggcttccgagacggaacagccctgatcaagcagtgatttggacagggtgatgcgttttgcggtgatgtatttgttgatggtggtgccggtggcctccttgaaaatacggcacagataggacgtgctcataaaaaaatgcgcggacagaccggcgagcgtcagcggctcgccgatattggagttgatgtaggataaaatggcatccacctgggcgtggtaattggaagatggagcctgggcgggggctgcggcgtctgtgcagcgggctgcgaaggctctgtttaaaaagaccatcagttccagaaagattgcctgatctaagaggtcttcccccatgccgccatcgtcatgcagctcgtggataaagtacataaagcggttctgctccttgggggagagatggatctggtgcggcattctggtgtcacggaaagaaaaacaatgaccaagatctgtcacgccggtggagagcttcgataagtattccgggtcgatggagaggatgatccgctcgtgtgtctgctgatcgatctgtgtcaggtggtggctttcaaactggttgattaagaaaagatcgccggggcggatgtcgtacaggcagtggtcgatcagaaactgttttccgccggaaatcgagtaatagacttcgcagcagttgtgaatgtgcatgtccatgatcttctcatcgccgtagagatgggcgaacgcgaatgtgtgggtgctcatgcagtgttcgatggcttctttgcaggttatacagctattcataggttctccgttcttacgattccaggcggcagtgccgccgttttttaatgcgccagtggcgctatgtgccttgtggtgttatgtgttctgtagcgcatgtctctttacacagcataggacaaaagttcaatatttgcaagatttataatacaatattgcgggaaatggaataacatatctgatatactaggtgtaagcaatgagcagtaccagagtaataagagagaaaaagaaaggacggaaaactatggttaatttttcattagagggaaaagtagcgctggtaacaggcgcatcctacggcatcggattcgcaatcgcatctgcatatgcacaggcgggagcaacgattgtattcaacgacatcaagcaggagcttgtcgacaagggacttgccgcttatgaggagctgggcatcaaggcgcacggatatgtctgcgatgtcacagatgaggagcaggtaaacgcactggttgcaaagatcgaaaaagaggtcggcgtgatcgacattctggtaaacaatgccggcatcatcaaacgtattccaatgtgcgagatgtccgcagcagagttcagacaggttatcgatgtagatctgaacgcgccgttcatcgtttccaaggcagtaattccatctatgataaaaaaaggacacggcaagatcatcaacatctgctccatgatgtccgagcttggccgtgagaccgtatccgcttatgcagcggcaaagggcggcttaaagatgctgaccagaaacattgcatcggagtacggcgagtacaatatccagtgcaacggcatcggaccgggttatattgcaactccgcagactgcaccgctccgcgagatccagccggacggaagcagacatccgtttgaccagttcatcatcgcaaagaccccggcagcaagatggggaagtgccgaggatttacagggaccggcagtattcctggcttcggacgcatctgattttgtcaacggccacgtattgtatgtggacggcggtatccttgcttacatcggaaaacagccgcagtaagtaatttcaggcagcataaaaatgacatagaaatagtgtattttttcataagaaagtctatggaaaaatgcactatttttttataccataataaaaaatcaggaagctgtctgtaagggaatctgtgcagtacgactgccaagaagaaggaatcaggaaagctgcagacagaagaacaaacgcccggaaaggatggcgggatgacagaaaaaatgagcagagaaaaagcggaatggagtccagagtggcttacgatccgcgaatttatacatatcacaccggttaatctgttccacaaggagcaggaggaaggggaaaaacaaccggaggcagagcaacagctgacagcggaattccggcggaatctgcatgttctggtgcgtgcgcgttttacgcttgagacggcgcaggagaacctgacgttaagactgacggcggacgatcactacaagctgtacgtggagtccggatttgtggcggagggacctgcgcccggttatccggatcactactattacaacgagattccattggggaagatggaggccggagagcactgcttcggactgcatttatattatcaggggttaatcaaccgtgtatacaacagcggcgacctgcgctttgcgtttgccacagagttgatggatgcgcaggactgtcggataccgcttcgtttttgctataagaggacggatgcgtacagcggcggaacgatcggatatgatacgcagtttctggaaaactttgacagcagaaaattcccggaaggatggagcagtgcggaatttgatgatgccggatggaagacgccggctgcggcagagtgggcggattaccggttgtatttacagccgacgcggatgctttgcggggagcgcatcaagccggaaaaaatcgagatctgtgaggatggcagcatccggatcgatgtgggagaggaagtcgccggaagcctgtgcctgacggcggagggaagcgcgggggataccgtggaaatcttctgcggagaggaactggatgagagcggcagcgtccgctgcgagatgcgctgcaactgctcctaccacgagatctggacgctcacagacggttgctgcagtctggaaccgtatgattacaaggggttccgctacgcaaagctgcttccggggaagggcgtgaacattcgcgggattttcgtgcagacacgccactatccgatggaggagggcgcagaggtgatgtcctccgaaaagcggctggagcagattttttccatctgtaagaacgcggtaaaatacggaacacaggagggctatgtggattgcccgaccagagaaaaaggacaatatctcggggatgccgttgtgacggcgcatgcgcaggtattgctgaccggagagatgcagatgcttttgaaatgcatcgatcagtttgcgcagacgagggcagtctgcccggggcttctggcggttgcgccgggaggactgatgcaggagatcgccgattattccctgatgtatccgcagctgctggcactatactaccgctacaccggcgacgcggcggcgctgcttccatactatgagacggcgcttggcatgatccggcattttgcgcagtacgagcgcgcggacgggctgcttgtgcaggtggcagacaagtggaatctggtcgactggcccgaaaatctgcgggatgattatgattttgcgctgacaagacccgttgtgggggcggggtgccacaacgtcatcaatgccctgtatctcggtgcgaaaaaaacgctcaacgggcttgcacgtgtgctgggaagagaggatccgtatgagctggagaagccggttctcgcgtatcgcagggcgttttaccggaaggagacggggcttcttgcagacagtgaaacaagcagccacacatcgcttcactccaacgtgtatgccctgtatttcgggcttttggaggaggcagaggaagcgccggtcgttgagtttttggaaaaacggggcttttcctgcggcgtgatgttaagctattacctgctgcttgcactggcacggcgggggcggtatgaaagtgtgtacaggctgctgctaaacgacagcgatcacggatggtgcaacatgctgcgggagggagcgacgacctgctttgaggcgtgggggaaagaccagaagtggaacacgagcctgtgtcatccgtgggcgagtgcgcccgtgcctgtgatcttagaggagatcgccggaatccatctgtcgccggaaggcggctgtgattttgcaccgcatattcccaaggaagtggattacttccatacgtccgtgcggatgcgtgggaaaacgtataccgttacgaagcaggacggggaaatccatgctgcgatagacggcatagagcagccaaaagcagatgcaaaataaaagaaatcccggacaaaagctatcgggaagaaatcagcagaaaaaatggaggaagaaaagatgttgtatccaagagaaaacagagtgcgcggagtgatagatctcggcggagtatggaattttaaactgggagatgagaaggagccgggagactcctttgcgatgggggaggacactgaactgatggcggtaccggcatcgtacaacgatcagaaagatgacccgaaataccggaatcattacggctgggcgtattacgagcgcaagatcacggttccgtcctatctgaagggacagcgtctcgtgctccgctttgacgcggttacacatgctgcaaaggtgtacttaaatggcagatttctgactgcgcataaaggcggctttcttccgtttgaggtggatgtgacagatcagcttgtgccgggagagacggcggaactcgtcgttgcggcggacaaccgggtaaatcacagcacgcttccggtcggaaatgagggcagcacggcatttttcggatcggacaatccgggcgtgccgagtgttgaagcggcgaaggtatggagaaaaccgcagaatctgccgaattttgatttctttaattatgcgggaatcaaccgtccggtccgcatctatacgacgccggcggcttatattgatgacattacgctggtgccggacattgacggcgataccggagtggtaaattatgagattaagacggcgggcagcgtatgtgaggatgaggtgcgcatccgtattctggacgcggacggcaatgaggtggcagcggcggatggagcgggcggaacagtcagaatcccggatgccagactgtggtggccgtggccgggggagccgtacctctatacggcgagtgtcacttacggggaggatctctacgaggagacattcggcatccgcacggtggcggtagagggaacgcagtttttgatcaatggaaaaccgttctattttaagggctttggaaaacacgaggatgcggctttccgtggaagaggactcgatgtgtgcctggatgtcaaggatatcaatctgatccactggctgaatgccaattctttccgcaccagccactatccgtatgcggaggagatgtatcagctgtgcgacagagagggtatcgtcgtgatcgatgagacgcctgcggtcggaatcggcgcgggagataagatcgacccgtacaagacctttcacatcagagagcaccacgagcaggtgctgcgcgagatgattgcaagggacaagaatcatccttgcgtagtcatgtggtcgatgggaaatgaaccggacaccgagcattttccggagtcggcgtacgattactggcactcgctctatgagctgacgcacagccttgatccggcagaccgtcctgtgactttcgtgtgctgccagaacaactacgagagagatctcgtgacgaggacgatggacgtggtgtgtgtgaaccgttactatggctggtacaatctgtccggcgatctcgatgcggcatgctatgcattaaatatggaactggatttctgggaaaaacagaacaaaccggtgatgattacagaatacggcgcggatgcggttgcgggtatccacgagagcgtgccggaaatgttctccgaggagttccagaaggaatattaccgcagacagaatgcggaatttgacaagcgcagcttcttcatcggcgagcaggtctggaattttgcggatttcgccacaatccagggctgcatgcgcgccgacggaaataaaaaaggtctctttaccagagaccggcggccgaagatggcggcacactattttaaggagcgctggggacagatcccgaattttgagtacaaataaatgacctcctgcctgtatgtcagcgggaaaggtcttccatttctccatggtcagatttgaccgtcttgcggtagctgctgggagaaactcctgctacttttttaaaggtctgggaaaaatagctggaggaggaaaaaccacaggtatggctgatgacagaaagagagtaatctgtggttgccagcagcttttcagctttttttacgcgggcatgcatgagatagttgatgggagaaatcccatactcatcagtaaaggcatgtaccagataatatttgtttacatgcgaaaattttgccagatgctccaaggagagatcatccccgcagttctgatcaatatagcgccgaacggaatcgcagaggtgggatgctcttttgtttgcgggactgagaatcgtagaaaaattggtctggcgtccgaaaagaacgataaggatttccatcaaatcctgacagactgtttcatagccggcagagcgggtttcgatttcacggagcattacttttaaatagaagttaacggtatctttgatttccctgaaatttacaatgcagaagttggcgttgttattttcaacggaaagttccagcccttcaatgcccaaaacgatatattttaatggattggcattgaaaccaagttccgtatgggacacattgggattgatgaccaccagatcgttggcagaaaccgggaagatattatcttctacctggaattgtcccacaccgtcaattacatagaaaagctcagaacagtaatgggtgtggggcgtactgatccagtcaccaccgtaggttgcagaggaaacatataaaagtcttgctttatctcttgttaaatattcttttggaatggagatgtcgaaacgttcatttcccataaaaacctccccaaaaacttattttcatgaatatcatttttgcgttgtttttgcgtagaaacttctaatatgaactcgccagagttcattatatcatatgtgtctttgcttcggcaaaagtccggaaaacctctggtttcccggacccgcgggcgcgttcacatggaacatatccgtccgacacatgcaagcatgcgcgtccgtctttgttccatgctcacttttgccttcgcgaacattatatcacgaaaagacagcggtgtattgtgttaaattgttgctgaatatcaatatcttgctgaacaatataataaaatataagagcagtgaatcgtcattttgcacattgaaattggtgtgataaaaaatactacgttaaaatgacggaaaataataatgctgaaaatgaaaaggctgtcaaaatactcatatttttagtaaaaacagcaagatattgatagaataggacaacatagaaattgaatagtaggatatggaaagctataatgaaaccatcaacaaatgatgtattgtttcaaaggaggatttaatatgagaaagaaattagtaggcacactgcttatagcagcgatgaccgcttccacacttgcaggctgcggaagcagtaacagcacagcaggcacttctgcatccggcggtgcagctgaaaccagcccggcagagtctgcaacagaagctgaaggcacagatgcagcagatggcgaagaagttcttactgtatggtgctgggatccaaccttcaatgtatatgcaatgaaacaggctgaggcaatttaccagaaagatcatcccaattttaaactggacattcaggagaaggtttacaccgatattgagcagaacatcattaccgctgctgaggccgataattatgacacactgccggacattttcctgatgcaggataattctttccagaaaaatattgcaaactatcccgaggtgttcacagaattatcagattccggtattaattttgacgatttctccggtggtaaattaggagattctaccgcagaaggaaaacactacggtattccttttgataatggagcatctattatggcaatccgttctgatatggtagaggctgccggtcttaccgttgaagatttcaaggacacaacctggtctgagttcatggagctggcgaaaaaagttgtcgatgcaaacggtgttcccatgctgacaagttccggcggttctgaaattgttatcgagatgctgcagtctgcaggcgcatctcctatcgttaatggtgaagttcatctggcagacaacgcagctttgaaaaaagcaatcgaggtttacaagcagttaatcgatgaggggattatggttgactacaccgactgggatcagtacattgcatccatgaacaagggtgaggctgctggtgttatccagggctgctggattatgtcatccattcagtcggcagaagaccagtctggtaagtgggctattgtaaacatgcctgctttagacggcattgatggtgccaccaattacgcaaactgtggtggtgcaagctgggcagtatcttctaattgcaagaacactgaactggcatttgatttcctaaagacaacctttggtggcagcgttgaattatacgatgatttactccctaacgccggcgcaatttccagctatctgcctgcagcacagtcggatgtttacaatcagacttctgatttctatggtggacaggcagtatacaaagacattgttgagtttgcaggcaaagttcccgcaattaactatggtgcatattataatagaagtgcactgaccgatgcaatcactaacgtagtacagaatggtgctgatattgatgaagaaattcagaatgcacaggatgctgttgaatttaacattagtgaataagtaagtgaaaaatgagccagtaccgggatcagcgtattgcgttcccggtattttttcacaggcgaggatgcacaggtttttacagaaatatatgtcgcccaaagcggcgtaaaagcggcgcagaatatcgcgaaacgatattctttttaatcaggagaatttatatgaaacagaagaaagcaaaaatgagtttggaaaaaaaacataacctgaccggatgggcatttttaattccggctgcacttcttatctttatcttttgcttttatcctatgatacaggcaattatcctgtcctttaccaaaaaaggatcaggatttgcagggctggcaaattaccagagaatattaaaggataagacgttccagcagtgtctgtttaacactgtattttactttataatccaggtgcctgtcatgttacttctggcactggggctggcacagcttttgaacagtccgaagattaaaggaaagagtattttccgtactcttatctttcttccatgtgcgacatcactggtatcctattccatgattttcaaatccttatttgcccaggacggtctggtaaataatattattacgacccttggctttgacagagtggactggttccagaatgcatgggcagcccgttttgtcatcatcattgcactgatctggagatggaccggatacaatatggttttctatcttgcgggcttacagaatattgatgattccgtatacgaagcaagttatattgatggagcgaccccttttcagcagtttatgaagattaccattcccttattgaggcctaccatcctgttgacggctattatgtcaacttcaggtacgttacagttgtttgatgagtctgttaacctgacttccggcggtcctggtaagtccaccatgacactggcgcattatgtttataatatctcctttgtggaaacacccaaatttaactatgcggcagcaatttccgtatttatccttgtgagtgtggcagttctttctgcaatccagatgaaagtaggtgacaaacgtgactaaagtaaagacaactatcgcttatattattttaatcattgccagtttcctgtcagcgtttcccctgtactatatgatttgtggagcaaccaactccagcattgatattgtacgtggaaaactgttcccaggtatttatctgatggaaaattaccagagtctcattgcaaaccagaatctgggacgagccatgtttaactctttccgcaatgcaattgtgattacagtgattgcactgttaatctgttccatcgcaggctacggctttgagatttatcatgacaagggcaaagaccttctgatgaacatcctgcttcttgccatgatgcttccctttgttgctattatgattcctttgtttaaaatgttttcttcatggaaactggttaatacatggattgcactggcactgccttctctttctacaccatttctcattatgatgttccggcaggcagcccgttctttccctcatgatattatccaggcagcccgtctggaaggacttagtgagatcaggattttttttaccatgttcctgccaattatgaagtctacctacggcgcagccatgacagtaactttcatgaatgcctggaataactatctctggccaacgattattttacaggacagcaaccagattaccatgcccatgttggttgcaaacttaaaaagtggttacagcgtagactatggtatgttaatgctgggggtattgatttgtacccttcctaccgcaattatctttctgtgcttacaaaagagttttgccaatggaattgcaggagcagtgaaataatgaatcggaaatattgtctggataaaaaagaatgggaggaggcgcaggcagcccttcttcttgcaaaacagttcgggctcattgaagatgccggtatcgaggctttagaaaaaaggcgggcgaagaaaaataaggaaaattctctttatggtgtccgtttttattctccagccatgtatcttcagtacgaactcacacgatttaagctggacttcgttcagccctcggagcagataaaaaagctgggggtctgccccggctttacggaggaagaaaagcgggcattttatgaaaataaccaggatttgttcgggcgttaccatggggatttgtttgactatgaggatgtccggcagattatcgaaaaaagactgagggaggatgcctatgacaggctcatacaggacatattatgtcaatcagaaaaccgggcgtgatagtaacgatggactgaccatggattccccgtttgccagcctttttcaggtaaacagattgaaactgtaccctggcgataaggtgctgctggcccgggattccatttttacagatcagtttctgcagatgaaagacagtggaacaagggagcatcccattgaaattggctcttattcaccggaagaagagggggagggaaaaaatcccctgatagcagccgggggacagggcatctggtatcaggattacggtacaacattggattcacctgcgcatgtttatcaaggttatgtatcctctgccgtacttttatatgatgtagagcatgtggtcatccatgatattgagattagcaatcaggcagtggaaattctgggggaagattacagtgctcctcataaaatgaaccgtactggcgtggctgtggtggcaaaggataagggggtgcgcagcggcattaccctgcgtaatctttctatccatgatgtgaatggcaatgtctatgacaaacatatgaacaacggcggcatttatatgacagctttaaagcctgccgatgaaaaagctaccggtgtggcgcgctttaaagatatcacggtggaaggctgctttgtatacaagaccagccgttggggaatcgctgttggatacacctatgcacatgacaaattccagggggcggaactgcccgaggatacctttttgaaatacggacatgaaaatatggtcatccgggacaattatgtaaaagccgctgggggcgatggcatcactgcgatgtatgctttgcgcccattagtagaacacaatacagcagattccgttgcatgcgaaatcaatgacaggatttactgccggccggagaaccgtgccggaaaagtggcagcaggcatctggccatggaagtgcaaggatgctctgttccgctgcaatgaagtggcagatacaagattaaatcaggacgggatggcttacgatgcggattctggtgatggaaccatttacgaatacaattacagcagacaaaatgagggcggatgcattatgttctgccagtcagaagcaattcacaacagtttttgccataatgtgagctatgacgatctggggggtacggtaagcccgtcggagaacccggatgctttgctcgcccataacactttttatgtgagggagggtgtgccttttgtccgtaacaagatgggcggtggaacttataccgaggaggataatacgattattccgttgtaaaacgctgttacaacgacttaacttttgcaggaggaaaagagaccaatgactttaaaagagggacgtgtaaccattcctaccaacctggatgtggtgccggaaaccatagaattgatgaaacgctggggtgctgatgccattcgtgactgcgacggtacagagtttccagaggaactggtcagaaccggggcaaaaatttatgccacctattatactacccggaaggacaacgagtgggcaaaggcaaacccggatgaagtacagcagtgctatgtgatgacatccttttacactgctgtggatactgacttggagattccccttatgaaaggtatatcccaggaactgatgatggtcaataccagagacgacaaaaaacggtggtgggaggttgtcgaccgttctaccggtaatgttgtgtccgcagatcattgggaatatgaggaggaaaagggctgcgtggtcattcatgatgccattcctttccatgaatacacggtcagctttctggcttacattatctgggatccggtacatatgtacaatgcggttaccaacgactggaaaaactttgaacatcagattactttcgacgtgagacagcctaagacccacaaatattccctggagcgtcttcgcaaatactgcgcggatcatccctacgtgaatgtgattcgctatacaacctttttccatcagtttaccttgatgtttgatgagttaaagagagaaaaatatgtggactggtatggctattctgcctctgtcagcccttatatcttagagcagtttgaaaaggaggccggttacaggttccggcctgagtacatcattgaccagggttattacaacaaccagtaccgtgtgcctagcagggagttcaaagattttcaggcattccagcgcagggaggttgccaaaattgccaaagagatggtagacattacccatgagtatggcaaagaggcaatgatgtttcttggggatcactggattggaaccgagccgtttatggaggaatttgccaccattggacttgatgcggtggtaggcagtgtaggaaacggtagtacccttcgtctcatctccgatattgaaggtgtaaaatacacggagggaagatttttaccgtactttttccccgatactttttgtgacggcggagacccggtgaaggaggcaaaggagaactggattaccgcaagacgtgccattctgagaaaacctattgaccggatcggctatggtggatatctgaagctgactctggattttccggaatttctggattatgtagagaatgtgtgcaacgagttccgcgagctgtatgagaacgcaaagggaacgattccttattgcgtgaggaaagtagctgtgttgaacagctggggtaaaattagaagctggggatgccatatggtacaccatgccctataccagaaacagaattacagctatgcgggaattattgaagcattaagtggtgcccctttcgatgtgcgatttatttcctttgatgatattctggcaaatccggaaattcttaaagatctggatgtgattatcaatgtgggagatggggatactgctcataccggtggcggcatctgggagaatcctgccatttccgcagctatccgtgagtttgtatataacggcggaggttttatcggtgtcggtgagccgtctggtcatcagtttcaggggcattacctgcagcttgcagatatgctcggcgtggaaaaagaaaccggatttactttaaactacgataaatataactgggaggagcatcccgatcacttcattctggcagataccacgaagccagtggactttggtgagggtaaaaagaacatcttcgcttacgaggacacggaaattctggtacagcgggagaaggaagtgcagatggctgtccatgagtttggaaaggggcgctgtgtttatatcagcggtctgccttacagctttgagaacagccgtattctgtaccgcagtattctgtggagtacccacggagagaaggatctgcatcagtggttcagttccaacttcaatgtggaagtacatgcctatgtgaaaaatggcaggttctgcgtggtcaacaatacatatgcccaccagaaaactgtggtttatcgtggtgatggcagcagttttcctctggagatggaggcaaacgagattaaatggtataacatttaacacgggcaaaagaaagaagtgcctcaagtccggttgatatagtcgcgcggcgacacgccctccacctttttgaatacccggctgaaatagaacgcgctctcgtaccccagtttgtcggagatctcatagatcttgagcgttccctcatccagcatttccttggcacattcaatctttgcgtggtttacataatctataaatcccatatcgttgtacttggaaaacaggatcgacagataattcgggctgatgttgaagacgtcggagagctgattcagcgtgatcttctcatcgacgtgttcattgatatattttttgaccgcggagatggttcggttcttgtaatccttgttgtgctcggaaaacaggcggcacagaccgtcgcacagcacggtcatccaggagagcacctgcggcaccgtttccgcctcgtagaggcagttgtacccgttggcggattcaccaaagatctggtttaactgttcttccccgttgctcaggcaggagagggttaagtgcagcacgttgctcgcggcggataaggcctgggagtaatgtctcttatcattggaaaacaggtcaatgatgtcgtggaagactgcggagagtgcttccggatcgtattcgttgaacgctttctgcagctcatccttaaagatggcaatgttgaagacgttgtgctcctcgcgggcgggattgtcctcgtcggcaaagataacggcagaatcactctggcggacgtccgggaaaatctgtctggcgtccgaataggaggcggacagatctctcggattttcgacgagagagccgaccgatgcaagaatccttatgctgtaataattgtagagcatgtcgcctgtctgtgtgagtgcatcggtcagaagctgatgatagctgcccgtctgttctttggtcagggaaaaaataatcgcaaggtgtgtcgtgtcaaggaacagaatccggcatggcacatatttgacgatcagattccggatcatctggtagctgctgcggtagagtgtgatgtccgacgatgcgacagcggacgcactctgcctggtattctgcatttccagatacgccaccgtgtagccggcggcagtgaagcggacggacagaagatcgcactgtgtcgcaaattgttcctctgtctcgaatagatttagaagcagccggatataaaaattatcctgcaataaggagagatcggaaccggtttccgggatggctgcctgttttctctctttttccagaatgccgagagccttctggatggcagcgtttaacacatcttccgtcagctcgagctttaccagataatccagcacctggtaggagatcgcctgttttaccagagcaaattcctcatagctggttaagagaataaaaagaggcggatgctcttgggactgacatttctcgatcagctgcatgccgtccataatcggcattttgatgtctgtaatcacaatttccggatgcttttccagaatgatatcatatgcctgcctgccgtttgtggcagtgcctgcaatttcaattcccatgctctcccagtttaacatggagcggatgccgatctgaaccagcggttcgtcatccacgataagaagctgtaccataactgtaaccccatttctttgttgtaaaaatatctgtctgcatttagccgatgtcttcctgcggcgcaaacggaagcaggacggacacagtggtaaattcggaaagccggctttccacacgcaggccgtaatcttcgccgaattcatactgcagccgcttgtgcacgttgctgacgccgatttccctgaaaaattcagtcttttcattcttgttctcggacaaaagctgtcttgcctgttcttccgtcatgccgacgccgtcgtcggtaatgtcgatctgaagaatcgcgtcatttttccggaaaatgtgaatagtgatcgttccgggtgttccctttggctcaatgccatgaaagatagaattttccacgaccggctgtaaggtgaagcgtggaatcagacagcttaatgccgcctcgtcatcgatcctgtattctaaggagatggttcctccataacggtatttctgaatcgtaaaataatcatccagaagggagagttctgcagagagcggaaccgacttttctgttccctttgcgatgttttttaaaagtctggagagcgccgtcgtcatctccgcgatgccaggcgcattctggatcgttgccatccatttgatggaattgagcgtgttgtagagaaaatgcggattgatctggctctgcagcattttgtactcgtactcacgcttctcattctcatcgcggatccgttgatccatcagtgttttcacatcttcggcgagatcgttgatgcttctgccgatgtcgccgagctcgtgctgccactcgatcgaggagtcgcgctcgaaatttccctcggaaatgtgcttcattcggacctgcagttcctgtaccggatgattgatcatatgattaaaaatcgtgtgaagaatgataccggtaatgacggcgcacgccacgatgacgaaaatgatggatgcaagctgtccgtaaaacgtattgaccgtgatcagctgcgtgatatagcagtgttccgcggcgagcggaaccgagatggagacgaactttccgttggcatttgaaatctcctttacgatcgtatcggagaaagatgcaatggaggagagatctcccgtaatctcataggaagggttggcgtccgtcagggtgtaattgctgtacacatagctgtgatcttccaacgtcaggtaaaagtcgttgttctggtaggttccggcggtcttaagcggtatggtgacgacgttcggcgacatttcgatgtagataaaaccgagctcgtcggaattatactggctgtaaagcggccggatgatcggaagatactgtgaaccgccgtcggttgtcaggataccttcgctataagaataggaaggactgctgtagtagctgtcaaaaaaatagagatcccggatatcgtctgccgagtggaagggctggttgttggtggaagcaagagcctggataaaatcccggttcttgtaggaggcaataaaaatgcgcttgatatagtagcggccatcgtaactgttgtagcttcccttcagataagtagaggcggtgatacgcgcactctgggaaccctgtgacgacagataattcaggataaaagagttcgcctgacagttgcggacgaaagaataagcatcctggatgttgctgtcaatggaggagccgagcaatgtcagagaggactccgcggtgcggatcatattttgttttacacttttataatagaaagaatagctgatataggacacagcgatacttaagaaaatacagagtgtaatcgtagtcagtgtaattcgggatcgaatcgtcgtaaattttttcttcataccttatattatagacacaaaaagaaaattcggaaagaaaaaaatccattttgggagagcgaaaagcaaagtgaagaaaaaaagacaggttttgagaaaaaagacaggtttgggaagaaaaaatgcagacgaaaacagaaagaggaaaaaaatgtgaatttaaacgtaaaaaaatctatgtccattgtatggcaaagccaatataataaaatcatcttatcggagaacgatagagatacgaaaaggaggattcagatgaaaaaaagagtattgagcatgcttcttgtagcaagcatgacaggggcgttacttgcaggttgtggctctggggaaacagcttcaacggatgcatcagcagatgcggcagcagacacaaacaccgctgcggcaggcactgagacagcagcagatgcggctgcgacagatggagaggcagtcactctcaaatgggcaatctgggatcaggagaccactccttactggaacgcactcaaggaggcatatgaggctgcaaatccaaacgtcaccattgagatggtagaccttggatcaaccgattacatgactgttcttgcaacggagttatccggaagcggatcggacttcgatgtggttacgatcaaggatgtaccgggttacgcaacgctggttcagaagaacacgctggagtccctggatgattacatcacagatgcaggaattaacctcgcagacttcaacggaatcacagatcaggtaacagtagatggaagcttatatgaacttccgttcagaagcgattactggctgatctactacaacaaagatgtatttgatgcagcaggcattgcttatccgtccaacgatatgacgatggaagattacgatgcactggcaagacagctgacagataccacctacggttcccaggtatacggatgccattatcacacatggagatccgcagtcgaactgttcggaatcctggatggaaaacactctatcctggacggcaattgcgactggatgattccgtactatgacatgatcttaagtgaagaggatgacggtgtatgccagacctacacagacttaagcacagaaggtcttcattactccgcagcattctccaacggaaacgttgctatgatgaatatgggttcatggttcatctccactttgatttccaaccttgacagcggcgagtatgacagctctctctgcggcaactggggtatcgcaagctatccgcatccggacggagcagaggcaggcagcacgatcgctaccatcacaggtcttgctgttacaagcgcttctgcaaacaaggatgcagcatttgatttcgtaaactgggtatccggtacagagggcgctaaggtaatggcttccaccggtaacttcccggcaattatgacggacgatgttatcaacacaatcgccggcatggcaggattcccgacagacgagagcagcaaggaagcattaaacatcacaaatgcataccttgaggtaccgtatgctgagaacgtatcagagatcaacagtatcctcgacacctaccacacttccatcatgaaccgtgaagtgaccgtagaagagggtgtagcatccatgaatgagcaggttggaaagattctgaaccagtaatggaacggaagcataaccacgattgctgataaaagggctggctgaaaacagccggcccttaaaaatgaaacagcttaaaggagaaaggaaataagccgtatctggcttttgggcatggttatggataagaagaaagcagtaaaattagagcagatggaagccgagatggcaagactgtgggaacaaagtcagaacgaaactgataacaagaaaaaacagaaactgattcaaagcagaaacaaactgcagtggaaggctgctgcaatgcgaagcggccgcaaactgtcaaagcagaccagagacgatctggttgcctattctttcattgcgccgaacttcatcggattcgccgtatttacattgatcccgatcatatttgcctttattctggcatttacggaatgggatggaaacaacccgattcagtttgtcggactttccaatttcttgaaactgccgtcggatacttttttcacggcatccttaaaaaacacgattatctactgtgtcggcacggtaccgcttaccatggttgtgtcgctggcactggcaattgtcttaaaccagaaggtgaagggaagaggattttttagaacggtatcgttcttcccgtatgtagcatccctcgttgccatcacaacggtatggtccatgatttttcatccgaccaagggaccggtgaattatcttttgatgacaatctgcgggatcgagcagaagaatctgccgaactggtttagcggaaatctgattatgctgacacttattttattcagtgtctggaaatatatgggttactacatggtaatctaccttgcgggactgcagggaatctcgtcggaattatacgaggcgggaagcctcgacggggcgacgacctggcagaaatttaaatatatcacctggccgcagctgcgatccaccacctttttcgttgtcgtgatgctgacgatcaactgctttaaggtgtatgacatcgccatcatgctggcaggcggaagccagggcaagttaagcaactctgcatccgtacttgtttactacatttacgaaaatgcatttgattactggaaactcggttatgcgagtgcggtcgcaatggtactgtttgtactggtacttgctgtaacgattatacagtttgcatatgagaagaagttagaagactagaaagggggagaacagagatgagagaaataatgacaaagcagaaaaaagaaacatcgatgaaacgaaacaatctgatcaagaagttcttcctgtatctgattttactgattatcacggcggcaatgttgatcccgtttatctggatgctgtccgcttccattaagacagaccgtgaagtattccagatgacgccgtttgttctgattccggagacaccgcgctggagcaattacgtggatatctggacgaagattccgtttggcacgttcgtgaagaacaccgtgttcctcacaatcgtggtgaccgccttacagcttttgacaagcagctttgcagcatactcttttgcaaaactggagttcaagcataagaatgtactgttcatggcatacattgcgaccatcgctatgccgtggcaggtatacatggttccgcagtttatcatgatgcgtaagatgggattgaacgataagctgctcgcaatgatctgtctgcaggcattttccgcattcggcgtgttcatgatgagacagttctatgacggtattccgaacgaactgtgtgaggcggcgagagtcgacggcatgagtgaatacaaaatttattcgcacatcatgcttccgctgtcaaaaccggcgctgtccacgctgacaatcttcactttcgtggcaacgtggaatgactacctcggaccattgatttacttaaaatcccaggagaagaagaccattcagttaggtctcaaaatgttcatcggtcagtattcctcccagtacggactgattatggcaggctcggtactttccctgattccggtactcatcgtatttatctgtctgcagagatactttgtagagggaattgcatctaccggtttaaagggctaagaccgaaggtatgtaacaaagctgtcacacaaaaagagatcgtttgtgtgacggctttgttttactctacaggaataacgtgttggataaacataacatgatttgaaaacggaaaaggagaagaagggtatgcgatacgaagaaaaaccgcagatcacagagcaggagatcagagaggcgatggatttctccacggcgcaggtaaagcgcaatctgccggagttcacgacgaagttccagaaggcttacagcgagaacgggttttacgcgccgacggacaatgtggactggacgacgggattctggacgggcgagatctggctgtcctacgaggataccgggaaagacatctataaaaaagccggtgaaatccagattgacagctttttgaaccgcattgaaaacaagatcgaagtcgatcaccacgatatgggatttttgtattcgccgtcctgcgtggcgggctataaactgaccgggaatgagacgggaagaaaggcagccatactggcagccgatcagctcatccgcagatttcacccggtgggcaattttatacaggcgtggggtgcgatggatgcaccggaaaactaccggctgatcatcgactgtcttttaaatctgccgctgctctactgggcgtcggaggagaccggcgatccgaagtatcgggacattgcggagaagcatattcacacggcggtcgccaatgtgatccgtgaggatcattccacctggcacacctttttcttcgatatgaagacgggggcaccggatcacggagccacctgtcagggataccgcgacggttcggcgtgggcgagaggccaggcatggggcatctacgggatggcgctcgcctacaagtacacggaaagggaagaatacattcagaagttccgggatgtcacggactttttcctggcgcatctgcccaaggatatggtgccgttctgggatctggagttcacggacggggacgatcagccgagagattcctcctcggcgtcgatcgcagcatgcggaatgcttgagatggcaaaatatctaaagccggacgaggcagaagcttaccgtgcaacggcaaaacggttgatgaaggcgttgtacgacggatacgcggtgaaagatccaaaagagtcgaacgggttggtgttacacagcacctattccaaccactctccgtataatacctgcaatcattacggggtggacgagtgcaatatctggggagactatttttacatggaagcgctcatgcggctgaaaaaagactggaatccgtattggtaacaagggaaaaaggaaggtatggcaggatgaaaagagaagcattttttgacagggatgcatcacactattactgtgaggatggaaaagcggtcggggcgtactgcagggagcaatttccagaagatgtcgcgcagacgcttgcggtggcggacggtgtgtgccggaaatattttctgttcaactccaagtgggatctggagcagaccgacaagccggtacagtttgacggagcgatcgactggacgtatatgccggcagacgatccggaatttgtctggcagttcaacagacaccgctttttcatgacgctcggtcaggcgtatcagatgaccggggatgagaaatatgcgagagcgtttatggagattgcggaggactggatcgatcatgtcccgctgaacgagaagtatgcggcgggaccgtggagaagtctagacaccggctttcgcggggaatactggagcaaggcgatctggctgtttcatgacagcccgacgctcacggaagcgtttttacagaaatattatgacagcatgatcctgcaggcggaacacatcatggaatgtcattccgcttaccgctatatgagtaactggggcgtcattgagaatcacgggctgtttgagatcggcgtgtgtctcccgcagagcgagaagacaaagcagtttatcgcgtttgccgtgaagaatcttgaggtgcaggtgcggatgcagatcatgccggacggcgtgcactgggagcagtcgccgatgtatcacaacgaggtgctgcactgcctgttagacgtgatccttctggcaaagcggaacggcattgcactgccggacgtgatcctgcgccagacggagaagatggcaatggcggatgtcgcgtggttaaagccggatcaccacatcgtgatgatgggggacagcgacgacgtggatgtgcgggaccgcatcagcgtggcggcgtatctgtttttaaatccggtgctgcggtttggcggattcgaccgtcttgattatgaaagtatctgggatctcggcatgaaagccggggaagaatatgcggtgatggagcgcagaaaaccggactttacatcgctgtttctggaacacagcgggaacacttatttccggtcggactggtcagaacgcgccaatttcctgcatctgcattccgggacgatgggagcggggcacggacattccgataagctgcacatcgacctggttgtaaacggcgaggatgtgctgatggacggtggtagatatacctacgtttcaggaccaaagcgtttttcgtacaaggatccgtcaggacacaatacgatcacggtggatgatctgccgtttaccgtctgcaaggattcctgggagtgctcgaagctttcccagccggtcaaagagaatttccggtgcatggagctggcggaatttgcacaggcagggcagctcggctacatggatcttccgggcggcgtctatgtgaaccggaaggtggtttacataaagcctgacctgtatattctggtggatgagatgtacaccggggactgtcacacctaccagcagtattttcattttaacaatcatggtgcggtgacgttgactgcgccgggagaaaagaagttcccatgcgtggcctatcgtggtaaaatggcagaagcggatttttattttgtgtcggcgcaggtgaaagcagagcttaagcgcggccacattgcaagacattacaatgtggaagaggaaaatacggtgtgtaaggtgacaaagccgggggacggttttaccagccttatcacggtcatcgatgcacatccgggacgcccgctttcgattgagaagcttccggtgcgctcggcattaaagcagacagactatccggagacgatggcggaggcattaaagatcaccacaggcgaaaaggaatatgtggtgatcctctgccatcaggaggtcaattcgccgaccgacctcgtggaggcagacggctgtatgggctacggaaatgtgattgtctttgacaaggccgaggatgtgctggtgggcgacgttctgaactggtaggagagaagcaaaaaggaggatgcgcggtgcgaaagaaactggagcattggtggacttattataaaggtgtcgtaatttttgcagtggttctcgcggcagcggtcctctatgttgcggacaccatggggaaaaaagaaaagacacagattctcatgggagaagtggtcaacaatgtgcaggacgatgcggtgacaacccagatggaggaggcgatcctcgccgggatcgggggcgatcctaacggggaggaggtcgtcgtggacacagcgcttaccatggatgcagccgcgctggggcagacgccgatcgccgatgccaatacgcaggattccctcgcaacgatcacgacgtacgtgtatgcgcacgagctcgacttcatgattctggaaaaagatgtgtttgactattactgtaacctgaatgcgtttgctgatcttggggaactgctgggcgctggggcatgtgaagcgctgggggcgcgcatctatgaaaaaaacggtgtggcatgcggcatcacactgacagataccgcgtttgtgaagcagtacgggattacgctcttagacccggtgatcgggattgtgagcggatcagagaggaaggagcaggcggtcgggatgctccggtggatctttgaggagaacaccggggtggcagccgcgttttcggcagaggaatacaaagcgatgatttcgcaggaagagacagggaggaaagacgatgggaaaaatgtttgatatggacaatccggtctggcgttttatgggaaaggtgacggatatgttttttctgacatgtctgtggctgcttttttcactgccggtcgtaacaatcggggcggcgacgtgtgcactgtgctattgctccatgacgttagcgtccaacaaggagggctacatccgggaagattttgtgcgggcgtttaaggagaattttaaatctgcgacgatcgcctggatcggaatgctggcgctcggaatctttttcggagcggatttatatttttattatcacctcgcaggcggcgtcggaacggtgtttttctggatttttctggtgctgtcggtgatttttgtcttcgttgccctgtatgtgttcccactgctggcatggacagacgcggatttaaagaagacgcttgcgcttgcgtttgtgatgtcgtttaagaacttcggctggacgcttctgatgctgacatccgcggcactgtttatcacggcagcgctgtttgtgttctggccgctgcttttcgtgtcggccggcggaatcgcatatgtacacgcgaagatcctgacgtttgttttttcacagtatgaatggagagatgagaggaaagatggcagtgataacgattaagatacagaataaggatggcatgaccttaagtgttgccagaggagaggatgaggcggcactggtctacacgaaagaatacgaggagggagatgagatcatctttgagatctccccgaaaaatgccttctacgaactgatggcggatgatgcgctcggggcggcaaccgtctatgtgaccggggacgtccactacaggattccgttcggggagagaaagatttcctactcgcccaagacattttccgggaaccggcatttaatcaccgcaaagcttgcggatatgacatgcttcggctcctgcaggaatcttgcaaaaaatgtgatggaccagcatggggagaccaactgttatccgcatgcatcggcgaatgtggagacgcgcggggaggcggtgttcgccgccagaaacgcgatcgacggcgtcacggtgaatgatgcgcacggagagtggccgtatgaatcgtggggaatcaaccggcgcgaggatgcgaatatgaagctggaattcggcagaaaggtggcggtcagccgtatccgtctgtacacaagggcggatttcccgcacgataactggtggaagcaggtgacgatccggttctcggatggaagcgaggccgtggcagagctggaaaaaagcgaaaagccgcacgagatcgtattcgaggagcgggttatcacagaactgaccttggaaaagctgaaaaaagcggacgacccgtcgccgttccctgcgctgacgcagattgaagtatacggaagagaagcggagaagttataagcgtatatcggaggaacagaagatatccagaaaccggagttggaaaagacaagtctgactttgggattctggatattttatttgcttatgggaaaaatttgtgtgacttgtgcatagaataaaatagcaacttgacgtacgcaatgacgtacgctataataactatgacataaaaatctcgacattcataagcataaaagaacataaggcaactacatcggatttgatgtaactaaaatgaagaacaagaatgtacgagaatggaacaagagattttcaaatgacaaaataacaaaaaaatatagaaattacactacaagcaaaagggagatttattatgtcggcaatcaatataacaaatgcaagaaaggaactctacagtctggtagaagacgttaatcgctacagcgaaccggctttaattgtaagcaaaaaaggaaatgcggttcttgtttccgagaatgattggaatgcaattcaggaaacgatatatttgaacgcaattccaggtatggttgaatccataagaagcgggatggatacgcggttagaagattgtgtgccagaggaagatgtagaatggtagatctatgtacagaattgtatatgataagcaggcagtaaaagatattaagaatttgaagagtgccagacttgatgataaggcgaaaaagctgatagaggtcatccgggaaaccccttttcaaaatccaccaccctatgaagcgctggttggaaatttgcagggagtttattcgcgaagaatcaatattcagcacaggctggtttatcaggtgtatagtgagccagtggaatggaaagggatgaggtatgatggaaccgtgaaaataattagaatgtggacacattatgatggagtctgctaatatttttacgccaacaggaaggccgaaagctaccgggacgcattgcggttctcctttttttatggtagagtagaatagaacgaaaacaaaagacggcttaggataacaggaggatatagatagaatggagcagtacaagcaggagtttattgaatttatggtggagagcgatgtgctcaagttcggggagtttaccttaaaaagcggcaggaaatccccgttttttatgaatgcgggggcttatgtgaccggatcccagctgatgcgtctgggcgagtattatgccagagcgattcatgagacctatggggatgattttgatgtgctgtttggaccggcatacaagggaattccgatcagcgttgtgactgcggtggcgtttcacaatctgtatggcaaggaggtgcgctactgctctgaccgcaaggaggagaaggatcacggggcagataagggaagcttcctcggcagtaagttaaaagacggtgaccgtgtggtcatgattgaggacgtcacgacttcaggcaaatccatggaggagacggttccgaaggtgagaggagcggcagatgtcacgatcgtggggctgatggtatccttaaaccgcatggaaaaggggcttggcggcgagaagagcgcattggaggagatccgcgaaaagtatggatttgagacgaatgcgatcgttaccatggaagaggtggtagagcatctgtacaaccgcacatgccagggacgtgttgtgattgacgataccatcaaggctgccattgacgactactataagcagtatggctgcaactagaagaaaacatcgtcttgcagcaggaattttatttctgatttattttgtggtgctgttttattttctgttcttttcggagaagatggggcgcacctacagcgagcgggcatatcattacaatctggttccgttaaaggagatcgcgcgttttgtaaaatactggagagtcctcggcatgaaagccgtactgctcaatattttgggaaatgtggcggcgtttctgccgtttggattttttctgcccgttttttcaggcaggtgtaaaaaattctggcggacggcattttacagttttgaactgagtcttctggtagaactgctgcagcttgtctttcgagtcggaagctttgatgtggacgatctcctgttaaatacgctgggcggtatggcgggttacggcctatatcgcctgtttgtgcgttattatcatcagagaaatcagagaggaaaagaaagtggcgagacgacatagaaacggatacagatttacagagaagacacactcaaagaggggtgtggcagcactttttttgtcgattatttccatcgggatactggtggcggcggtggtcagttcttttgacagccgcgggaacgggagcatgtatctgggaagtgcgggagtgacatcgatgctgatcggcatctgtgcgctcgttctggcggtgaagagccttggggaggagaattcgtttaagctgttcccgtatctttcgacgctctgctcgcttctgattaccggaatctgggtggcgctgtatgtgatcggctttttggcataggagaagaatatgacggattttgagaaacagatggcttttatcatggagttggataagataaaaaagataacaagacagacctatctgtcggatggaagccgcaaggaaaatgatgcggaacattcctggcatctggcgctgatggcgtttgtgtttgcggattatgcgaacgagaagatcgatgtgttaaagacgatgaagatggtgctgcttcacgatgtgattgagatcgacgccggggatacctacgcatacgataccgagggcaataagaccaagcgagagcgcgagttgaaggcggcggaccgtattttcgggctgcttccggatgcacagcgcatggaatatcgcggtctgtgggatgagtttgaggcgatggagacggcggaggcgaagttcgccaatatgctggacaaggtacagccgcttcttctgaacaatgcttcggacggcaaatcctgggtggagcacggcgtcagggagtctcaggtgcttgcgcgcaacagcagaacacatgagggatccgagaaactgtgggcgtatgcaaagtcgctcattgaggaaaatgtaaaaaaaggacgtctccagccgtaatccggatggatttgtgttcaggcatggctgacgttttcataaggtaatacaaatcccgcaatggcgcgggatttattgtttgtgaggaggaattgatttgggatatcaggaatgttataaggagacaaatgaactggcggcggagcgctatgaactggtagcggaacggattgcagagattgcagaggcggcgcaggcgccggagccgtttgcggagtatttccggacaaatgccgcatatttacagagccttcgtgcactgtatgaaaaaggaaaaagcggcagtcttgcggcgcggagcatggaggaatgtgaggcggacaatgaggcgctctacggggagatcctgccggaagcctacggacacagctatgcgaatccggcctacgccgctgcacgtctgggagagacgttcggcggagcgctctcgcttcttgcggcacatcttcggacggcatgcggggaggttttccgtggaaatctggtgcagcttacgatcgcgatggagctgtttgtggaggtctacaactgctttgaaggcgcagcagcagatgccctgccgcaggaaaaagaagtgcagcagattgtgtactggtattttcatgattatcgggagatttttgacgagcggtcggtgcggcgtcttgtgaatcctgcggaggattttgaaaaggagatcgtgatgcaggcggatctgtcggatctgcgttacctttaccgctacggcgcttatatcggagagaatgagagacagattgccgcttatttaaatacactgccggaggcggatatccaggcgatggcggacacatacacggaaggctaccagatcggttttgagacgacgggcaaggatctgtccaaaaagacggcggcgcaggtacggtatccgattggcttcgagcgtatggtgcgtgcagcagtgtgcaattttgaaaaaatgggactcgaagtgaccatgttagcgtcgggaacggcagccaacaagcagtatgactacgatcacagggaggatcgcgcgtactatcttgacaaggcgtacgtggagcgcggactcgagacgtggaaaaacgcatttgaggaagaaaaagtacatgcgaacggcatggcggggccggcggtgattgaggtgttcggagaagaacctttttctccggagacaaaaaaagaggcattccgttacggtgaaaaacagcagcagctctgtgtgtatgagatgagccagcgcggacagatcacgaaccagtacatcaagggggaggagcgcagttttacgatcattgcctacccgcttccgtcgatcggcgcccgctttgaggagattttcgcggagacggtgaagatcaatacgctggattacatgctctaccgcaacatgcagcagaagatgatcgacgtgctcgatcaggcggatcgtgtgcacatcacagggaaaggagccaataagaccgacttgtatgtcaacatctggaagcttcggaatcccgaaggggagaccgcatttgagaactgtgtggcggacgtgaatattccggtgggcgaggtgtttacatcgccggtgcttgagggaacgaacggaaagctgcatgtcggacaggtatatctgaacggtctgaattacaagaatctggagatcgattttaaggacggcatggtggaaaaatacacctgcaccaatttcgaggatgaggcggagaacaaaaactatatccgcgacaatgtgctgatgcaccatgagacgctgccgatgggagaatttgcaatcggcacgaacacgacggcataccggatggcgcgcgactatgacattgcggacaaactgccgattctgattgcggagaagaccggcccgcactttgcggtgggggacacctgctacagccatgaggaggacaacctctcttacaatccggatggaaaagcgattgtagcgcgggagaatacggtatcggcgcagcgccatgagaatccggaaaaggcatatttaaactgccacaccgatattacgattccgtacgacgagctggataagatcactgtgatccggaaggacggtacgacagaggatatcatcgcggacggacgttttgtgcttgccggaacggaggcgttgaacggaccgctggaccggtaggaaggtgagccgggcgggatagatacttatattagctgtatttataaatcacataaaaagtgttaattggacttctaaatgcgcggacgctatactaagagcagattgagaaactggcgcatgggaaggattcggttccgcgcgcaggattcgtgccccggcgcacccggcacgaacccggtatggcagaatgtgcgcagaaatgaggagcaatatggcaaaagtaggtattgtgatgggcagtgattccgatatgccggtaatggcaaaggctgccgacattttagagaagcttggaattgactatgagatgacgattatctcggcacaccgtgagccggatgtatttttcgagtatgcaaagagcgcagaggcgaagggctttaaggtcattatcgcaggcgcgggcatggcggcgcatcttccgggaatgtgcgcggcgatcttcccgatgccggtcatcggtatcccgatgcacaccacgtccctcggcggacgcgactccctgtactccatcgtacagatgccgtccggcattccggttgccacagtggcgatcaacggcggtgcaaatgcaggattacttgcagcaaagattctggcaacatcagatgatgcaattttgcaaaaattaaaagaatattccaaagaattaaaagagcaggtgcaggcgaaggatgccagactgcaggaagtgggatatcagaattactaggaacaggaacggatgattttgcaaaaagtcgcccgtgttgcgttggatagacaacagacaagcatataggaggaaaataggatggattacaagaattccggtgtggatatcgaggcaggatacaagtctgtagaactcatgaaaaagtatgtaaagggaaccatgcgcccggaggtgcttggcggacttggcggattttccggtgcgttctccatggagagctttaagaatatggagaagcctacgttagtatccggcacagacggctgcggaacgaaggtaaaactggcatttttactggacaagcatgacacgatcggtattgactgtgttgccatgtgtgtgaacgatattgcatgtgccggcggcgagccgctgtttttccttgactatattgcctgtggcaagaactatccggagaagattgcgacgatcgtgtccggtgtggcggagggttgcaagcaggcaggctgtgcgttgatcggcggtgagacggcagaacatccggggctgatgccggaggatgagtacgatctggccggtttttccgttggtatcgtggatgaaaaggacattattacgggagctgatcttgcggcgggtgacgttttgatcggtatggcaagctccggcgttcattccaacggattctctctggtgagaaagattttctccatggatgcggatacgttaaatacctatcatgaggagcttggcaaaacacttggcgaggcgcttttagctccgaccagaatttacgtgaaggcactccgtgaggtgaaggaagcgggcgtccgcgtaaaagcatgcagccatatcacaggcggtggtttctatgagaatatcccgcgtatgcttccggagggaaagcatgcggttatccggaaggacagctacgaagttccggcgatctttcagatgatggcacgcgagggcaaagttgaggagcagatgatgtacaacacctacaatatgggtatcggcatgatcgtggcagtggatccggcggacgtggacaagacgatcgcggcaatgaaggcagcaggagacacaccgtatattgtcggcgagatcaaggatggtgaaaaaggagtaaccttatgctaaaagtagcggtactggtgtccggaggcggcacgaatctgcaggcaatcttagacgccatcgatgagggcagaatcacgaacgcccgggtagacgttgtgatcagcaacaatccaggggcgtatgcgttggagcgtgcgaaagggcacggcattgaggcgctttgcatttcaccgaaggattatgagagccgtgaggcattcaatgaagcgtttctggcgaagcttgacagctatcaggtggatctggtggtgttggcaggatttctcgttgtaattccggagcagatgatcgcgcagtaccgcaaccggatcatcaatattcatccgtcactgatcccgtctttctgcggcaaaggcttttacggcttgaaagtacatgagggagcgcttgcgcgcggcgtgaaagttacgggtgcaacggttcattttgtggatgagggaacggatacaggaccgatcattttgcagaagccggtggcggtcgaagagggagataccccggagattttacagcgccgtgtgatggagcaggcagagtggatcattcttccgcaggcgatcgatctgattgcaaacggcagagtgtctgttgcaaacggacatgtgacagttgagaaataagcgtatgagttacagagtgcaggaggaagcggatatgaaggtattggtagttggaagcggcggacgtgagcatgcgatcgtgacgagtgtggcaaagagcccgcgcgtggataagatctactgtgcgccgggaaacgcgggaattgcatcgcttgcagagtgtgttgcgatcggagcgatggagttcgacaaactggtggcgttcgcgaaggagcatgcagttgattttacaattgtcggcatggatgatccgctcgttggcggaattgtggatgtgtttgaggcggagggcttaaaggtgttcggaccgcggaagaatgcggcgatccttgagggctcgaaggcattttccaaggatctgatgaaaaaatatcacattccgacggctgcctatgagaatttcacatctgcagaggatgcgcttgcttatctggagacggcgaagatgccgatcgtattgaaggcggacggactggcgctcggaaagggtgttttgatctgcaatacgctcgaggaggcaaaggcgggtgtcaaggagatcatggaggacaagaagttcggctccgcgggaaatacgatggttgtggaggagttcatgaccggacgcgaggtatcggtgctttcctatgtggacggcaagacgatcaagatcatgtcctcagcgcaggatcacaagcgcgcaaaggacggcgatcagggactcaacaccggcggcatgggtaatttttccccgagcccgttctacacaaaggaagtggacgagttctgccaaaagcacatctatcaggcgactgtggatgcgatggcggcggagggaagaccgtttaccggcgttattttcttcggtctgatgctgacggaggacggaccgaaggtgcttgagtacaatgcgcgttttggtgatccggaggcacaggtggtgctcccacgcatgaagaatgacatcattgatgtgatggaggcatgcgtcgatggaaagctggatacgatcgaccttcagtttgaagacaatgcggcggtatgtgtggtgcttgcatccgacggttatccggtgtcctatgagaagggatttccgatcacaggacttgaaaagttcgacggaaaggacgattatttctgcttccatgcgggaacgaagttcgatgagaacggcacgatcgtcacgaacggcgggcgtgtgctcggcattacggcgactggaaaggatttgaaggaggcgcgcgcaaaagcatacgaggcgacagagtgggttgattttgcaaataagtacatgcgccatgacatcggacgcgcgatcgatgaggtaaagtagaataaaaagaaacaggaagcttccgttcgtgggatgccggtattttctacagagtgctgtggaaaagagaggtatcacacgaacgggagtttttttattcataggaaattacgtcctatgaatgaaaaagccctccgggcaggatcgcactgcgtcggagtggaattatatcgctagagcaacccgccgcaggcggagaatcctgcaaaacaggattttttcttgcagaaaatattgtgttatgtcaaaaaatgaaaagcttaatgcgttatatgaaaagtttagtgtgttaagcagtacaccatgattgcctgctggacggtgagcagatgttttttaaattcatatccgacgaaatagtcggagtcgatgacgtcgtttgagacttcctcgccgcggtaaaaaggcgggcagggatttaagatggcaccctcgtttgccagcttcatggcagcaagatcgacggtgcagccgcgggaggcggaaagaaggtcggccggcagtgagtcggtgcagatgatgtcttttccacggatggcgtcgcggatgcagtgatgtgagggcacgccatccatctcatatcccggaatacagcactgctccagcgaaaagcccatcacttcggaggcttccttccaagccagcccgatatttcctgtgacaccgcagaacagaaagtggtccatggtaaaatcattccgtatttttgagagcgcatacagatctgcagccatttcgcagggatgatttgcgtcggtcagcgcattgatgacaggtacggatgcagatgcagcgattttttccaaagcggccatatcccggtggcggacgacaagcagattggcccagttgttgaggtagccgatgacgtcttgcaaatcttcctttttgtcgagagcggaacttggaaacaaaatcggctgaccgcccaaaagcgcgatgcccttctcaaacgtgacccttgtgcggatgctggattccgggaaaaataaaacgacgcttttgccctgcagcagattctgatagtgcccctccaggatctcatcggtgatatggaagatttcgtaaatgtcagctttggtatagtcggtcaatcggagaaaatgtttcaatggaaccgcctttctggctgccggtgcggtagtgcggcagacctgtgctaaatgtcagaaaaatcaatgggttgcgctcttatcgtatcatttttgcgggttagaaggaagctataatattagaagaaagctatatttttgtgggatatgctttagaaacagtgctaaagatgttttgcgggtctggagtggagaaaaggtgcgctcagacccatgagttggaattatgttaacttatttgaattgtttttgtgcgacaccgggtctggaaagagaaaaataagtaattagactcggggattgaaattatgtcaaccattttggacagtcaagtccggaaacagggtctggggagagaaaaatacgcttccagacccgcccaaggaagaaagacgggtctgggaatgcgaaaataagcagctagacccggggattgaaattatgtcaaccattttgaacagtcaagtccggaaaacgggtctgggaaaagaaaaatacgcttccagacccgcttaaggaagaaaaacgggtctggagagaaaaaaatatactccagacctgtgaggctcaggattctatcagatttccatccccgccagtctcatctcccctggcttttcgtcacccgacataattcgtgacagtctatgtaagatatgataaaatgaatgctgacagatgcctcccggaagttccacggaacattggatgcacagaaagcagtgcagaaacaagggaaaatggatcctagcggatgcctcccggaagttccacggaatatcggatgtgcagaagagcatcgccgagatatggatgcgcagaaagtagctgtttatggacttttgccggaactcaaaatcagcatgacaaaatgagcgctggcaggttcgcagggtaagacccgcagacatggaaagtatgcgtcaaagagcgactgaaggtgtatgggaaagcaacggtcaggagaaggaatccgcgataaatcattgacggtatgccggcggaataaagaaaaaatcaggagataagatgagtagattattagaagaatttaaagaatatttaaaagaaatgaatcagtatgatcatgtgacaggattattgcagtgggatatgcagacgacagtgccgaagcttgggcaggcggcgcatgtggatgcgctgacctatttttccgcgaagagctttgagatggggacatcggagaaactgggagaatttctggagaaactggcgcagcctgcggaatatgatgcgttagatgacacatggagatttattgtaaaacgcatgaagcgcgattacgaccgcaataaaagaataccggcggatttatatgaggcgtttgtgcgggcagcggcggaatccggaaatgcatgggaagaagcaaaaaatgcatcggacttttccatttatgcaccgcacctccggaatatgattgagatgacgaagcaggtaatcggctatacagatccgggaaaggatgtgtatgacgcacttctggaacagtgtgaggagggcatggatcaggcaacgatcgaccggctgtttgaggaagtgaagacggaactgataccgttagtagagcagattactgcaaagaaaatgccggaaaatccgacatttcatgcctatgctgatccggacgcacagcgcagggtacagtggctgctgcttgattacatcggattctgcagggatgcgggagcggtcggggagactgagcatccgtttacgacgaatttttcttcaaaggatgtgcgtgtgacgaaccactactatgagacggagccgctcagcgccatgttttctgcgattcatgagggcggacatgcaatttttgaacagaatgtcaacccggaatacgacaatacggtggcgggcagctgctgctatatgggggtgcatgagagccagtcgcgcttttatgagaatattctcggaagaaatatcaatttctggaagccgatctatgaaaaactgggagaattgcttccacagtttaagaatgtgacactcgaagcgtttgagcgtgaaatcaaccgcgtggagaacagtatggtgcgcaccgaggcggatgaggtaacgtattgcttccatattatattgcgttatgagatggaaaaagcgattttctacgatcatgtgccggtggaaaaacttccggagctctggaatcagaaaatgcaggaatacttgcatatcactccgaaaaatgacgccgaaggcatcttgcaggatgtacattggtcggacggctcgtttgggtattttccgtcctatctgctgggcagcatctatgacggcatgtacctcgagaagatggaggaggaactcggctccgtggatgagatcctggcagacggcagaatcggtgagatcacaaaatggctcaatgagaagattcactggtatggaagcacgcggacaccgaaagaggtaattgcggcagtgtgcgggaaagaagtgtccgcgcagccgctcgtgcgctacatgaagaaaaaatacacgagactgtatggactttccgaggaagcctagacaaaagagagagaacgggagatgatgtcatgaaacgtggaatcatatttgacatggacggaaccctgtgggattccgcagagaatgtggcgaagtcctggaatgtggcaatccggcagtacggggtcagggagaaagaactgacaacgcaggacattcagggggtaatgggaaaaacgatggacgtaatcgccgatatcctctttgcggaattccccgaagaaaaacggagactgctcctaaaggaatgctgtcaggtggaaaatgattatctgcgggagcatgggggcatactctacgatcaggtgccgcagacgctcgcggcgttgaagcgggacggctatcatctttcgattgtcagcaactgccagaaggggtatatcgaggcattccttgaccactacgatttgtgggaactggtggaggacatagagtgttatggcaataatctgcggcagaagggagaaaatatccggctggtcgtagagcggaaccggctggatgaggcggtctatgtcggagacattcaaggagattatgatgcgagccgggcggcaggagtcgggtttatccacgccgcatatggattcggagagattgcggagccggtcccggaactgaaaacctttgcagacctaaaaacctttgatatttcatcggcgagcaaaacgcagagcgcttggaccatgtgagccggcagcatcgggcagccagagaacagagagccgtaaccatgtgagccggcagccgcatgcaggagagagaaagcatgacaaagtttgaagaattactacagcagatcaacagacagcatgtctatatacagacacataatttcccggatccggatgcgattgcaagtgcatatggtctgaagcggctgcttgcaaccaggggtatcgaggcgagcatctgctataagggcaagatcgaccggtacggtaccggccgtctgtgtgagattcttgacattgaactgttgaatgtggaggatctgaccgaagtgctgacggatgaggacgaagtgatactggtggattcccagaagggcaattccaacatcatcaatattacgggagatgagatcatctgcatcgaccatcatccttacaatgataagtgtcagtaccggtttcaggacatccgccccgaggtcggggcgtgcgcaacgatgatcgcgcagtattttatggaaaatgacattgcgatggataaaaagatcgcaacagcactgacatacggcatccgcattgacacgcacaatctttcacgcggcgtgtcaaagctcgatatcgagatgctctatcggatgtacgatgactgtgattatgaggagatccacacactggagaacagcaacctgtgttttgaggatctggtggcgtattccaaggcgatttccagcattgaggtgtacgataacatcagctttgccgatacgggggaggactgcccggaggcattgatcgcgagtgtctctgactttatgctggcgctggtggaggtttctttttccgtggtgtactcaaggagaggggatggcatcaaactgtccgtccggagtgaaaaatcttctctcgacgccggcaagatcacggcggaggcgctgcaggggatcggaaacggcggcgggcatgctgcgatggcaggtggctttgtaccgtttaccggttcggacggtaaggcggtcattttgatcgaccagatcaaggagcgttttttttcgacgattgcaaagcggagatagcacagacgcagagtctgcagagccggagggcagcaattggagcagagccggaagaacgcaagtgaagcagagccggaagaacgcaagtgaagcagaagcggaagaccgcaagtggagcagaaccggagggcagggaaacggcatttcagaccttgacaatgcgggcttgcaaggcttatacttacacatagttgacaaaggcagtgacgaagacagtaagctgtggatgaaaggcaaagcgagccggggcggtgagagccggtgcgagtaagccgcagacgaagatcccttccaagccgcagcccgaaatgcagccgcagatgtggcacagcagagcctgtgtcagacaggaaggcagcacggtaggcgctgacgcttttcctgcgttaaagggaacgggtattcggattttctccactggagatttttcaggcagcaggaagacattccaggatttctgcgctgggagaagtctgtgtacaatgtaattaggtggtataacgataaaggctctcgtcctatttacaggacgggagccttaaatgttttattttggaggaaaaaatgtataacaaagtagacacgaacctgaatttcgtggacagagaaaagcaggtaagagagttctggaaagacaacgacatcttcaagaagagtatggagcagcgcaagcagggcgagacttacactttctatgacggaccgccgacggccaacggcaagccgcatatcggtcatgtggagacgcgtacgatcaaggatatgatcccgagatttcaggcgatgaagggaaaatatgtgccacgtaaagccggatgggatacacacggactgccggtagagctcggcgtggagaagatgctcggcttaaacggcaaggagcagatcgaggagtacggaatcgagccgttcattaaaaaatgtaaggaatccgtgtgggagtacaagggcatgtgggaggatttctccgacatcgtcggtttctgggcagatatggagaacccatatattacctatgacaacaatttcatcgagtccgagtggtgggcgttaaagcagatctgggacaagaagcttttgtacaagggctttaagattgttccgtactgcccgcgctgtggaactccgctttcctcacaggaggtggcgcagggatataagacggtcaaggagcgttccgctgtggttcgtttcaaggttgttggagaggatgcctacttcctcgcatggaccacgacgccgtggacacttccgtcaaacgtggcactctgcgtgaacccggaggatacctactgcaaggtaaaggcagccgacggttatacctattatatggcggaggcactgctcgataaagtgctcggacggcttggaacaccagccgaaaagggcaaggacggcgagccggatacgccggaggtaaaggcttacgaggtgcttgagacctataagggaagcgagcttgagcgcaaggagtatgagccgctgtacgcctgcgcaaaagaagtggcggacagacagcacaagaagggatttttcgtgacctgcgacacctacgttacgatgtcagacggtaccggaatcgttcacatcgctcctgcatttggtgaggacgatgcgaatgtcggcagaaaatatgacctgccgttcgtgcagtttgtagacggaaagggtgaactgaccaaggagacgccgtatgccggcattttcgtgaaaaaagcagacccggaggtgttgaaggatctggaggcacagggcaagcttttcgacgcgccgaagttcgagcatgagtatccgcactgctggagatgcgataccccgctcatctactatgcgagagagtcctggttcatcaagatgaccgctgtgaaggacgatatgatccgcaacaacaatacggtcaactggattccggaatccatcggaaaaggacgtttcggcgactggcttgagaatattcaggactggggtatttcccgtaaccgttactggggaactccgttaaatatctgggagtgcgagggctgcggacatcaggagtccatcggcagccgcgcggagctggcagagaaaagcggcgatccgaaggctgcggaggtcgaacttcatcgtccgtatatcgatgaagtgacctttacctgcccggactgcggcaagaccatgaagcgtgtgccggaagttatcgactgctggtttgattccggtgcgatgccgtttgcacagcatcactatccgttcgagaatcaggatctgtttgcgcagcagttccctgccaaattcatttccgagggtgtggatcagacccgtggatggttctattccctgatggcggagagtacactgttattcaacaaggctccgtttgagaatgttatcgtcatgggacatgtgcaggacgagaacggacagaagatgagcaaatccaaaggaaatgcggtagacccgtttgaggcgctctctgcctacggtgcagacgcgatccgctggtatttctacacgagcagtgcgccgtggattccgaagcggtttaacggcaaactcgtgcaggagggacagcgcaagttcatgggtacgctctggaatacctacgcgtttttcgtgctgtatgcgaacattgacaattttgatgcatcaaaatatgtgcttgcctatgagaagctttccgtgatggacaaatggctgctctccaagctgaatacggtgattaaggaagtggataacaacctttccaattaccgcattccggaggctgcaagagcgctggatgatttcgtcgatgacatgagcaactggtacgtcagaagaagccgtgagcgtttctgggcaaagggcatggagcaggataagatcaacgcgtacatgacactctacacagcgcttgtgacgatctgcaagtgtgcggcgccgatgattccgtttatgacagaggatatctatcagaatctggtgcgctccgtggatcagacggctccggagagcattcatctgtgcgatttcccggtggcaaacgaggtgtacatcgatgcagagcttgagaaaaatatggatgaggtcttaaagatcgttgtcatgggccgtgcatgccgtaattccgcgaacatcaagaaccgtcagccgatcggaaacatgttcgtaaaagctccgtctgcactgccggagttcttcgtggagatcatcgaggatgagctgaatgtgaaaaaagtgacatttacagacgacgtgagcgcttacacaagctacacgttcaagccgcagctgcgcaccgtcggaccgaagtacggcaagttcttaggacagatccagaaagcactcgcagcgcttgacggcaatgcggcgatggcagaattaaaggcaaacggcgtgcttgcacttccgtccgttgacgagtctgtcaagctggcagaggaggatctcctgatcaccatgacgcagatggaaggttatgtgaccgagggagataacaccgtgacagtggtgctcgatacgaacctgacaccggaacttattgaggagggctttgtgcgtgagatcatcagcaagatccagaccatgcgtaaggaagccggattcgaggtgatggatcagatcacgatctatcacaagtcagatgaaaaagtatctggtatttttgagcagtatggtgatacaattaaatcggacgttctcggcgtgaatgtcgtggcggatgcagccggagcatttgcggatgagccggaagtttacagcaaggaatggaatattaacggcgaacatgttcttctgggagtgaaaaaaggaggaaactagatgaaatcaggtgtttttgacaagaaagcctttattcagagtgtgcgcgataatctgaagaatttataccgcaagacattggaggaggcggatcagcaggaaattttccaggcggtctccttcgcggtcaaggatgtcatcaatgacagatggcttgcaacacagcaggtatttgacaaggaagatccaaagatcgtgtactacatgtcgatggaatttctgatgggacgcgcgctcggcaataatctgatcaatctgaaggaatataaagaagtgagggaagcgctggatgagatcggcctgaatctcgatgtaatcgaagatcaggagccggatccggcactcggcaacggtggtctgggaagactggctgcctgctttatggattccctctccacactcggatacgcagcttacggctgcggaatccgctatcgttacggtatgttcaagcagaagattcaggacggctttcaggtcgaagtgcctgacaactggctgaaaaatggttatccgtttgaactgtacagaccggagtatacctatgagatcaaattcggcggacacgtccgcacagagagcagggaggacggaagtctgcgttttgtgcaggaggattatcagtcggtgctggcgatcccgtatgatatgccggtgctgggatacggcaacaacgtagtcaatacgctgatgatctgggatgcggcggcgaaggattattttgaactggattccttcgacaagggagattaccagaaagcggttgagcagcagaatcttgcaagaaatctggtggaagtgctctacccgaacgacaatcatgttgcgggcaaggagctccgcttaaagcagcagtatttcttcgtatccgcgagtgtacagcgtgcgctggcgcgttacaagaagaatcatgacgacatccgcagactgccggagaaggtgacgttccagctgaacgatacccatccgacggtgacggtggcagagctgatgcgtattcttgtggacgaggaaggtctcggctgggacgaggcgtgggagatcacgacgaagacctgtgcctacaccaaccatacgatcatggcggaagcgctggaaaaatggccgattgagattttccagcggctgcttccgagaatctaccagatcgtggatgagatcaaccgccgttttgtcatgcagatccaggaacgctatccgggcgatgacggcaaggttgcccgcatggcaatcctttatgacggtcaggtgaagatggcgcatctcgccattgcagccggttattccgtcaacggtgtggcaagactgcacacggagatcttaaagaacgagcagctccatgatttttacgagatgttcccggagaagttcaacaacaagaccaacggcatcacgcagagacgtttcctgatgcacggcaatccgctgcttgcagactgggtgacaaagcatatcggcgacggctggatcacagaactgatgcagcttgcacgtctggttccgtacgcatcggatgcaaaagcccagaaggagttcatggagatcaagcgcaagaataaagtgcgtctggcagagtacatcaaggagcacaacggcatcgaggtcgatccggactctattttcgatgtgcaggtaaagcgtctgcatgagtataagagacagttcctgaatattctgcatgtgatgtacctgtacaatgagttaaaagcgaatccgcagatggatttctatccgagaacctttattttcggcgcgaaagcggcggcaggctatcggaacgccaagcttacgatcaagctcatcaacagtgtggcggatgtcatcaacaacgatgcggacattaaaggaaagatcaaggtcgtattcatcgaggattaccgcgtgtccaatgcggagtggatcttcgcggcggcggatgtcagcgagcagatttcgacggccagcaaggaggcatccggtaccggcaatatgaagttcatgttaaacggtgcgctgacactcggtaccatggacggcgcgaacgtggagatggcagaggaagtcggaatggagaatattttcattttcggcatgagctccgaggaagtcattgcgcatgagcgcaaccgcgattatgatccgatgcagatctacaacagcgacgagggtatccgcaaggtggtaaatcagcttgtggacggcacattttcgccgaacgatccggggctgttccgcgatctctacaactcactgctcaacacgcagtgcacgcagtatgcagacacgtattttatcctcaaggatttccgttcctatgtggatgcgcagaagcggatcgtggagtactatcaggataagcaggcatgggcgaagagtgctattttaaatacggcccacgcaggcaaattctcttccgaccgcacaattcaggagtacgtggatgagatctggcatctggatcgcatcaccgtgccggatgcactggttgcgaaaatgtgaagagacaccgcaccggaaatgctccggaggtggatgaggaacattctccttcgacagaagagaaaaagatcgtgattccggaaaagagccggctctgatgaaaggagccggcggcggaaccatagagaagattcagaataaaaacggcggcagtccggcggagagtatccgcgggactgccgccgtcattttttatctgccgcgcaaagtatgcggcaggcgcacgcttcattccttcgcaggaaaatgatacttagcggttcatctcaagctggaatccggaggtatccttgtgctgtgcaatgatgccgtcgatctcctcaagatcggtaaagaccatatcgccgatgacgctgtgcttgatggcggccatggcgttgccgtactccaacattttctggcagtcgtgatgtttcaggtacccgtagagagcaccggagacataggcgtcgccgcttccgatccggtcgaccacatcgatgctgttgtaaggagattcgctgtagtaacggtcttccttcgcagagtagatgatggaggtaaagtcgtgcttcttcggagtgatgacggtgcgctcagtcgaggcaaccacggagatcggatattcttcacagaaggacttctgaatctcctcaatcgtgccggtcttgccgaaggtcagacgggcagtgtcggcggagcagaaaaagatatcgacatacggaaggatggattcgatgcattttcttgcctcctcgccgctccagaggttcgcgcggtagttgacatcgaaggagatcagggtgccgttctccttgaactttcggatacattcgatcgcaaacttctgtgcgttgccgccgagtcctaaagtgataccgctggtgtggaacagcctggtattgtagaacatggtagccggaacgtccttgatgtcaatattgttgatggatgaatgttttctgtcatagaccacacgcggctttctcgggtaggagccgtactcatagtagtagatgccgacgcggctgtcgtccgagtgatcctcgatcagataattctcgctgacacgggaagcgttgagctggttcttgatgaaagcggccagcaggttgttcggaatctttgaaatgattgctgtcttaaggccgagctgtccgatctcggaagcaatgttgagctcggcaccgccgaggtgcttcatcagcgtgtcgccctgtgcaagacgtccgttgatcggcgtggaaagccggagtaaaatctcccccaaagtgatgacatcgtatttacggtccataaataatctcctcctgatgatgtaagaataaataagaaagtaaaaattccgacacgtcacggcatctcaaaaagaatgctttatgagaaaatgcagcacactgtgtctatggatacgatatgtatgttccacattgcgaaacatagttctgtaatgtgaaccaatctgtttttattatatatcatcctgctaaaatagaaaagtgaaaatcggaaataatttggaatttttttggacttaaataaaaacatatttgacattctggtattagatgttataattttattatagaaaatgaaacacggtttcacatagtgaaacatacatttaggaggattcaataatggcaaagaaagtcgttacatttggtgagattatgcttcgtcttgcaccggaaggatactatcgttttgtacaggctggtacctacggcgctacttacggcggcggtgaggcaaacgttgcagtatctcttgcaaactacggaatggatgcaagctttgttacaaagcttccggctcatgagatcggacaggctggtgtgaatgcgttaagacagtacggtgtagacacttctgatatcgttcgcggcggtgaccgtgtaggtatctacttccttgagaagggtgcaagccagagaccgtccaaggttatttatgaccgcgcaggttcttccattgcaacagcaacgactgctgattttgactgggataagatttttgacggtgctgactggttccacttcacaggaatcactcctgcacttggtgacaacgttgcagcaatctgcttagaggcatgcaaggctgcaaaggctaagggcattactgtaagctgcgacttaaactaccgcaacaagctgtggtccaaggagaaagccggacaggtgatgggcgagctttgcaagtatgtagacgtatgtatctccaacgaggaagatgcaaacgacgtattcggcatcaagtctgagggtacagaggttaccgcaggcgaactgaacaaggaaggctacaaagaggttgcacagaagttaacagaccgttttggattcaagaaggttgcaatcacattaagaacttccatctccgcaaacgataaccgttgggcagcaatgctttacgaggatggacagagctacttctccaaggagtacttaatgcatatcgttgaccgtgtcggcggcggcgattccttcggcggcggactgatctacgcttgcttaaacgactacgatccgcagtctacgatcgagtttgcagtagcagcaagctgcttaaagcattctgttgagggtgacttcaacatggtaagcgttgacgaggtcaagaaactggctggcggcgatgcttccggacgtgtacagagataatattgacgtattatcgcttttgtaattgataattcctttccctaatttaatataccaaaaggctgtggtttccctgccgcagtcttcgcacagcaaattttacccatttgagctgtgcacacggagagcgtcccgcgttgcggggcgcttttttaacttatagaattagggtgtcaaaagctcattttaatatttgattttgcttgtaccttgaaaatttaacacgaatttgtgaaagatataatttttgatcctataatttattgatattttgaaactgtggttcattgattttatgctgttttcttatttgaagcatacgaatctaagctattggtataatctaatatctttcctattcacatgatacctttggcggagaagagatgaaattgcctcaactctatttctaaattatgagtattcagagaattcttctgtttgcatgtatgtaattgctttgtacaaccaacggatttccaaaatactctctttcgcacccatgtttttagaaaaatacgttcttcaggtacacaattattcttacatttgatgagatatttaccatcatctataaaaacaaaatccgcatatatttcatctggtttgcgtcctgtgaaattggttgtaacaggctttagattatgtcctgatgctaaacgtgagttttgttcttcgttgtatgttccatacttaaattcattttctgcataaacctcaaaggtttccgcgacgtttatctctgaggtttactccagataatcgttcagacaggtgacgaacagtgcattcccaaacaattagcaaagccgcccgattcccggacggcaaattggcataggatgcattttatactccccaaagcagtatgccgagtgcggcagaaaagagtatcattataatcggtgacggtgcagtttttttgattcttttatatccgaaatgtgtcagccacagaatggcaaagaccaaaatggatttaggatccggagcaagcgccgaataaatatccgtaaaaccaagcaatgttgatatggccataccgattgccgtagcgagaatcattgcgataacgcaggggcggacgccggagagaaaagcgttgacaccggcatatttcatcaggtttttgagtaccgccgcaattaaaagtataataatgaaagacggaagaacaacgccgagcgtagcaagaaacgagccgagaatgccaccttgcgtggaacctataaatgtcgccatattaacggcaagcggaccgggcgtcgattccgaaacggcaatgaaatttaagaattcgctttccgttagccagccgtttgaaatgactgtttctcttacaagggaaaccattccgtatccgccgccgaaggaaagggcaccgatcattaaaaaattcaggaataatttcaggtagatcattgttaattgccgtttcctttccgcagttttttcaggaagaaaatcgcaagtcctgctgtaccgcaaatcagaatatagtaaacggaagaaaaagaaacggcgaaaacagtgcacgccaacattgcagcaatgaccgacagcaaaatgaccgtgttgaaggcatttctttcaatggttttcagcattttcagcccggcagaggaaatcagatagatcacacatacctgtattccgcggaaagcacgggaaacccatgtaaggcttaagaattgatcaaaaaacagtgagatgcaaaaaattacggtaaacgaaggaatacaaaccgccacggtagccgccgcagcaccgaataagcctgcaattttgtagccgatatatgtggcgctgttgattgcaaccggtccgggtgtagactcggcaatggctaccatattcagaaagtcgtcctttttgatccacttcttgcgttctacaaattcgttttcaagcaacgcaatcatagcatatccgccgccgaaggtaaaagcgccgattttaagaaaggtaaaaaataaagtccattcttttctcattgccgcatcgcctttcttttacagataataaaaattgtaacgataccgaaaataatcaggtagccggacagcacctgtgatattaacggtgagtgaagcgcccaaaaggggaaatcggtttttctttacggtaaatcaatgcaactacgacaccgccaagtactccgccgtaaatggcaaggccgcctggattgactactaaaacagaaagcaggtcgtttttgttattatcccattcgaaaatcaaacggtatattgccacagcaaagccaagcaccataccgtaggtgatgatgattccgtaccaagcggatattgcgctcttgaattccgaaaggattttctattgcatatcggttcaatttcttgttttctcgcttttctcagtctacccgcagcatccgataaccaacgccgatatgcgtctgaatgtattgcggactgtccttttgcagctccagttttttacgcagtgtcgccataaacacccgcagcgaggcaatatcgttttcccagctgctgccccagatctgctgtgtgatataggtgtgcgtcagaacctttccgacattatgggagagcagacataaaagcttgtattcaatcggggtaagatgcaattcttccccttttaagtaagcgcaaccagcggcataatcaattttaagctcgccgttttcaaaaattggggtgtcggcatcgccacttgcttgcaggagcaacagccttctttgtgtgacacgaagccgtgccaaaagctcttctacggaaaatggctttgtcaaatagtcatccgccccggcgtcaagtgccataattttatcacgatcctcgctacgcgcactgatcacaataatgggcatattcgaccatgagcggatgctttcgatcacctgtgtgccgtcaatatccggtagacccagatccagcagaacgatatcagggttatgggaggtcgcctccataatcgcaccatgtccgttctccgcagtcagataacggtaatcgtgcgactttaatgttgttacgatcagattgcggactgggcggtcgtcttccacaacaagtataagcggtttattcattcagagtcacctcgctaagcggtaaagtaaaggtaaatacacagccgcacggcacattatccctaagcgtcagcgttccgccgtgcagttctacgatcgatttgcataaggtaagaccgatcccaaagcttctgcggctgtcggcaactgtactttttccagtgtaaaacatttcaaaaatatgcgatttcatatcgtcggggattccgctaccgttatctgcaacacggatcacggcgtattttccttgcttttctgcacttacgcagatctccgagccttgttcggtatatttcaaagcgttgtcgataagattgacgatgacctgtacgataagctgtgcgtccatgcgtgcaaggatcaaatcgtcacacttcaccgttaccgtgtgcccgacagacttctgcttcaaatgtgaaacggcttcactgatcacttcgtctacaagctggttggtaagctccagcttcaggcgtccgtcattcagccgtgtaacatacaacagattttccactacgtcaatcagccactcggaatcgtcatatatatctttatatatctgttgctttgtcgtttcgtccaagcagtttccgttatgcaaaagtgtgtccgcattgcctgaaatcgagcaaagaggcgtgcgtagatcatgtgagatcgacctcaaaaggtcggcgcgcagctgctcgctttttgcaagatctgctgcccgttctttttcagcagcgttgtgtgtattatccattgccagagcacattcgttcacaactgacagcacgatgctgttttcgaatgaatcgggcttttcaggtctcatcggtattccgatcactccatagactctgctccctgcacggatcgcaagataaagacattcggattgtccgaactgtgctgttgttgctcctgtacggcgaccgttttggaatgcccattctgcggctttctgttctgcagcgttcagcagattttcagagtatgtgtactttttttcggcgaaaagccgtccggtcgacattccattttcactttttgtataagcaacaatactgcggtcaagcagccgagagagctgcatacaggtcacacttaagatatcatcgttgcttttcgctttttgcagcagacggtcggtgtcgaacagcacctgcgtgcggaacgcagaacgagctgaaagtctcgcatgatccttaagcttcgaggcaagcgtgccggtgagaacggaagctaccagcatgacggcaaaggtaacgggatagcctacagcataggttttgaatgatagctgtggttcggtaaggaaaaatccgaacaatacaacacttaaaagcgagcctgccatactgcaaagatatcctttggtcaaaacggagaccatcagtacgccgagaatgtagaccgtaacgatatttgtgtcggggaaatcgagatgatcgaacaaaaaaccgatcgccgtgcatacggcaagtgacagaacggtcacgccaatatcccgcaacgaaggtgtttctgcaccgaaaagcaaacggtgccggtgcggtcttacatagttcagtgcgtctggaatgatatgaatatccacattgggagcgaccgaaatcagtttttcagttagggtgggttttccaaacagtcctctgcggcgggcgctgctttgtccgatcacgattttggtcacatctgaaagccggacatattccgaaatctgtagcggcacatcctcgccgtgcgtcataatgatctcagcgccaagcccttgcgcaagctgaatgttttgttcaagccgcagccgatttttttcgctttcaaccgaatcggtttgcacatagatggcggtaaattttgcatgaagaaccttagccatctttgcggcggtatgtatgatccgtgcattggacggtgaagaggaaaggcagacaaggatatgctcgtccgcaccgttttttggctgttcggtttgtatttgcatcggtttcaccgcctttttggtttcattatacaacaaaatcgtgaaatcttctaccgtaaactaaaacgcatcctcttttccgtcagaaaggataatatcgacttttccgtgtgtttcccgaaaacggcggatctcgcttaatatctcactgtcggacagtccttgcggcagcaaaatttcggaaaactcacggaatttgttctcttttaacagcgccttcctgtttttctcaagaaatcggtccagcctgctcataagataaaagccgaaagcaaatatgccaagcaagctgacaatcagcaatagttcagccaatgtcgttcacctctgttaaatgcgaaagcacctttgcagttctttataagcaccgagaaccaaaagtgtgatcttgtctgtaagaacagtttccggcgagactgccatattgatttttctgttctccttagtcgccataatattgatgctgtatttcctgcggatatcaagctctccgacggttttgccgatccattcctctggtacctctacttcaaaaatggcatgagaatcatcaacctcgatgtaatcccgaatgtggtcggcggtataccgaatagaagcccattttgccacctgtttttccgggtaaacgacctcgtccgctccgttgcgcagaaggaattttgcctgtacatcacgctcggcgcgggacacaactaattttgcaccgagttctttcagcaaagaagtagtttcaagtgagttttgaaaattacctccgatggtgacgatgcatacatcaaagttgccgataccgagcgactttaaaaactccgtatttgtgctgtcgccgatctgtgcattggtgacgatcggcaggatttcatttattctttcttcgttgctgtctactgccatcacctcatgcccgagtttgttcagttgcaaagcaatatgcttaccgaatctgccgagacctatcaacaatatgtttttcataacagtaactcctttatccgactgtgatcttttcgagcggcagttttgcaccgctctgatttttattagagatcgccgcatagatcagggtaagtccaccgactcttcccagatacattaagacgatcaaaataaactgagaaaaaacactgagctgcggcgttacgccgagcgtaaggccgaccgttccgacggcggatgccgtttcgtaaaggcaggcgctaagcggcatgccttctgccgtgctgataataatgccgccgataaaaaataacaggaaatatattacggcgatggttgaggcgctttttaccgccgagcattcaagccgtctgccatagacttcagtatcgttttttttacggcagacggaaaatgcgttcaagataagaacggcaagcgtagtcgtttttataccgccggcggtggaaccgggtgagccgccgacaagcatcagcaggatcataattgctttggaagattcagtcatggcggtaaggtcggcggtgttgaatccggcggttctcggtgtgacagactgaaaaagcgaggcaaggatcttctcaccgggcggcagtcctgtgaaatcgaagaggaaaaaaaatattgcggggacgataataagaatcaccgatgttactaatattaccttgctttgcatacggtattttttgaaatgccacctgtttgtacagatatcatcccaagtcaaaaagccaatgccgcccacgataattaaaatcataattacaatgtttattgtcggctctccgacgtatcccgtaagagatggatatttgttttcggtggtgccgagtatgtcgaatcctgcattgcaaaaagcggagaccgaatgaaacgccgccatccaaattcctttgaaaccgtgatctctgcaaaataccggtagcatggcaaccattccgataagttcgatcagaaaagtcccacgtacaataaagcgagtcaggcgaacgatgccgccgacttttggggctgaaatggcatcctgcatggtgctgcgttgcatcagcgatatttttctgccggaaagcatggcaaatgttgcagcaaccgtcacaacgccaagtccgcctatctgaataagcagcaaaatcaccgcctgcccgaaagcggaccaatagctgcctgtatcctgcacaacaagccccgtaacgcaaacagcggaggttgaagtgaacagtgcctcatgaaatggtgtaacagatccggtgtttgatgaaaatggtagcatcaagataagtgctccaagtacaatcactccggcaaaacccagagcaatcagcttaaaggatgacagccgttttttcctatgtataatttcaagcatatatatttctcctttttctgcttgcttacaaagagtataacgtgaaatataaaaaaaaggtgtaatgatctggtttactgtattaagatcgtataaagatgcccatgctaaaaaaatagtgcagcgtatattaaacggcacagacaaagacaaattgcttgaaactgttgtgcagctcgaaacagaacaacagtttcaagcaatttgaaaaagcggatgcagagattttggacagacgtgaacaacacaccgcctcctactcgattgggagaattcatccctgtcacacaaaaatacgttgtgaagatgcgtgaccgcgcaaattggaagcatgccgcatgaccgcgcccggcgcaaaaattctgtgacaggagtcttttttacttcctattttggcaaatatgtacaattatacgccgcctgttttctggcaatagttacgaaaattggaaaaaagcggaaaatattgattaaatcgggatttttcgtgttaaaatagaaatggatgctttaaaactgtgatgaaaggagaatcggggaagatgtttgagatcggtgagtatattgtgtatggagtgaagggtgtatgccggattgaggatattacccacattgacatttccggggcggataaagaccgtttgtattatgttcttgccccggttggcgatggcagtggaaggatctatgcaccgacggacaatcagaagattacgatgcgcaaagtgatttccagggaggaagcggatcagctgattgaggatatgcctaagatcgagcagctctgggtgccggatgacaggcagagagaggcgagatacaaggaggcaatgaacacctgcgattaccgtgcgtgggtcagcattgtaaagacactatacatcagaaaacaggagcgcacggcacagggaaagaagatcacggcgctggacgagcgctacatgcggacagcggagaatgaactgtacagtgaactctcgctcacactcggcataccgaaggatgagatggagcagtatatcagagagcggctgacgcaataaacgctgtgcctgcgtctgaaacaggattgttatgaaaaacccgtcatgaaatgagaaaggaaatcatttcatgacgggttttatgcaaaataggatacggtggcatgaatgccgtcactgctggcttctgccggtatggaacatattccatgcgtcatcgattgcatcgatccgtattatacggtggtattgacaccgttgacagcggcgtgctcatcttcgtccatcggaatgaccagacatttctgcccgtcgatgacctgggagtgaatctgtccgactttttccggcttgacgcgcaggatgacatcgtaggtcttgacggcagggacatcttcgccatcggcatctccctccgagaccggaacggagcgcgtctcctcgagctgttgctttaagttttccacctgctttaccagctccagcttttctttgcgctttccgttggcttccacaagcttcggatcaactaactgtccggcttccggaagttcctcgccaaatacattttcataggtgttctcaatgacggctgcctgttcctcggtgacaccgctttctgcaaggacatctgcaatggcggatctggtgacgatgaccggttccggttccaccgtctcgtcctccgtgaccggaatcatattgttcagattttcctggatatccccgaagacagcgtcgctctcttcctcatcctcaccgatgacttctttgacgatgctctggaatgtcagctttttctcggtggcggtcagcttggtgccacagccgagaccggattccatgaattccgcgtgcggtgtcttggtatccctggtgtagaacatcacggagtgaatatcgctgctgcggtcggtaaatgccggaaaaacgaaaccggtgtccggaacgccgaccacccagtcgcggatgcgcggcccgatgcggttctcgtcctcgcggtagccaagtcccggcttggtcagggtaaccggacagatggcgcacagcagatactcgtagacttcctcggactcgtccagcttattgttgtcggaggtcttcgtcatcacatcataggcatcatggaacaccagaatcagataattcccgacataactgtaattctcaatgacaagatcatagaaggtgtccatgaggtcatcgttttttaatgcgctctcgcgcagacccatcaaaaactgctgtcttccgcccggtgcttcctcggcagtcggaaattccagttccagaatgttgttgccgatcgtgccggacataacctttttggcaatttccaggtatttatagaattcctcatcctccagatttaagaaggtctccccgaaggttgtgaccttgttgcggtctgcgtcgacgtagcagccgcagagtctggtgaaggtgcaggcatcttttttaaaacgtctttttaactccaagatatcttttttattcatatatcatcatcctatgcctttcgtaaatcgtgcacaagatattatagcgaaaaaatgggtggtgtgcaagaagaatggaatgtggacacgggagaaatggaatgtggacacgggagaatggaaaggtacttgccggtgcagaaaagtacaggtataatggatagaagtggcgcacagcgctttttaataagaaaatgactgtatgcaggaagtgggcggcaggcagcgacagagggtggattgatggcaaaattatattattactatggtgcaatgggaagttctaagacggcaaatgcgctgatgacgcattttaactatgaggaagtgggacagaaagcgctgttatgtaaaccggcgatcgatgccagagatggcgagcggacggtatattcaaggatcgggcttcaacatgactgcattctgttagaagaactgcagcagatgaaggaggaggagattcgcggatatgactgcatcattgtagacgaggtgcagtttgccacgccgcagcaggtggattttctgtctgatattgtggattttatggatgtgccggtggtctgttatggactgcgcgcagatttccgtaacctgctgttccctgggagtgagcgtctgattgcgattgcggatgtgatccaggagttaaagacggtgtgctggtgcggcagaaaagctacctgtaatacgagatacaacgagcatggtattgtgcgctctggcccgcaggtcatgttaggagcaaacgacagctatgtggcgctctgcagaagacattttaagctgggaatgttaggacccgatgccgaagcaaaagaacagtgtgcggagtagaaccgtttctgtttggaaagcgggcaggtttacgcggcagggaatggaaaggaatacgatatgttagaaacggaacggctgctattgagaaagtggacagaggaagacgcggacagtttatttgaatatgcaaaagacccggaggttggtccgattgcaggatggccgccgcaccggtcaagagaggaaagcctggatgtgatccggaatgtactaaacggcagagagtgctatgcgatctgcgaaaagggaaatccaaaagcaatcggtgcgattgaactgatattaaacagacataacgatacggaaaatcatgacgaggaatgtgagctggggtactggcttggaaaacctttctggggaagaggctatatgccggaggcagcaagagaaatgatccgtcatggatttgaagatctcggcatgaataccatatggtgcggatattttgagggcaatcagaagtcaaaaagagtgcaggagaagattggctttgtatatcatcacacacgggaaaaggtatccgtgccgttaatgaaggaagtgcgtaccgaacatcgaaatataatgacgaaagagcgctggatggcggagagagaaaaaaattgtggaaaagtatgaacgagatattggtaaagcagctggcgattgatttctgtacagaggaaggagcagttaccagcagggaaaatatcttcactgtgtataccccgctgcagggacgcaggatttttgaagaaggggaatgttttctgaagattgcctgcatcaatggcaagattcttgcatccggtaagaaggatattattgcatgggtgagggaaacatttaaagacagaagcggcgcctggttcatggacgtggaagctttacatgagctggaagcaggtttaaaaatgtttcactgccagattgcacaggctcatccattttatattgcgaccgaaatgtccgaggtagacacgaaagattatgagatccgaatctttgagggagaagaactggagccattcagaggagatgaacgctttggagaagcatttctctttcatgagctgccaaaggatgaaattggggtaggagcttacagagatggcgtccttcttggcatggcgggcgctacaagcgacagcgacagcatgtggcagattggaattaatgtgatgccggaggcagaaggacttggaataggttccatgcttgttgcggtcctgaaaaacgagattttaaagcgcgggaagcttccgttttatggtacctcaatgtcacatatagcatcgcagagagtagcacttggggcgggatttgtgccgatgtgggcggagctgtattgtaaatcctgcaagtaaaggagaaggactcggtatggaaaaatgacatccataggaagccgaatgtcattataaaaagttcggaaaataagacatatagtgttgaaaatattggtataaaatacggagcagaacgggaataaacgcttgtattttcatatactatatgttaggacaccaatagaaatttgaggggtatgtaagcccatattagtgtgtgaatatatgtaacataagctgcctgtgtggcagccgctaatatggcagtgcccattttttataggtaaaaatagacatcaatctactttgacaggtagaatttgatgtcttttttgatttaacttttaacgaaatatcattatgccattagacaagggcaaatagaatttatctgctctacgcggactggagcggagcgaagaaactcgaacgacctggtccggcaggactcgaaaaaaagagatacatcatgcgatgtatctcttttcccagagcgcgagacgggactcgaacccgcggccccgaccttggcaaggtcgtgctccaccaactgagccactcgcgcataggttgctgtgtcggttatatctgccagacacatttgatatcatacaacatgagttacaatttgtcaacactaaatttgaaatatttatacagattaaagcggtacgaagaaaccagtacccggagtgcgagacgttgccagcatctggtggacgctggcaacgaccggagcggagcaaagaaacttggtcgaaaacacgacgcgcaaacccgcatgaaaggaggaggggcaatggaatcaaattgtaatcaaaaatatgttttaaaaagattacttgcgtagtataatgtataatacagtatcattataaaagagaatagaaatatcaatcactttcgtaattaattatggcgcgttataagtcgaacggaatggagtaatatggaaaatcagacagatgataaagttaagctgacagtggatgaacaaattacggatatgagaaccaaaaatgtgcaatttgaaatatgttccattgaagatgccaaaaaatttttgaagtataataattattactttaaattaaaatcatatgccagaaactatgttgtaaatccacagactaagaaatattataatctggattttgcatatttggttgaactttcaaaactagatatgcatattagaaaaataattttagaaatgtcattggatgttgaacattatttaaaagtacgtttgatgaatgacttaagtaataatcctcttgaggatggatataatatagttgaggtgtttttgcaatataatccatcggcgcaggaagacataaaaagaaaagcaagtacgtattcattttgctctgatttagcagagaaacatttaaatcaatataatgaaccagaaaaacttgcggtgtggaatattgtggagttgttgtcatttgggaattttatggaattgtatacggtttattatcaaacatacaaatcatttaattacattccatatttgaagtcgattaaatttattaggaatgctgcggcacataataattgccttttgagttcattgaaaaaacctaatagtgtaaagaaatttagtaaaacaaaagaattagcaaatgtgttgggaaaagcaccggaactgagacatttgaatagagaaggcatgatgaaaaatcctgttatacatgattttgtgacattgctttttgtatataacgatgttatgaaggtatcagctacaaaaaatgtaagaaataaaaaaatgcaagagataaggacactattttgtgatgataagggaagaatgaaaagaaataaggagttctttgagaaaaattcttatataaaagatgcgtacttttttgtaagcagtataatagagtatatagataaaaagaatcataatccgaaacacacaaatttcctataatttagtattgacatgaagaaagagaaaatgtacactatcagacatagaacaaaaatcgttggaggtttttactggggagatgcatgcattgaactggatttgagcttattataaaaaggttcactaaaaagtacaattaggtgctttttggtgagcctttttagctgctgataaaagagaaacaggaatgcaatacagatatgatcaattcttctggtggaaatattattttagcctctgctctgcgccgaccggagcggagcgaagaagtacgaaaaaaagagatacatcatgcgatgtatctcttttcccagagcgcgagacgggactcgaacccgcggccccgaccttggcaaggtcgtgctccaccaactgagccactcgcgcataagttgttgtgtcggttatgtctgccggacacatttgatatcatacagcgtagacgagcatttgtcaacgcctttttttatattttttgaaaaacttgaacaatttataattttaaggcgttttcatgacccaaactgtcatgtggcgagaggcggttcatataatgtaataatcagtatgcggaggcttaagatgagtgcaaagacaaagatcgtggttcttcatatgaaagaactgatttatacactgattttcgcaggacttggaattctgctgatttttttactactgttcatgttcctgcccggaaaagaggacggagagtcggtagagacaatgaggtatgtggcgggagtgtacacgtcatcgatccagtttggagagcatgcggtggatatgcaggtgattgtggatgaaaaccggattcagtccgtctccatggtcaatctcgatgagacggtggagacaatgtatccgctgatggagccggcattggaaaacattgcggatcaggtggtggaaaaacagaccacggaaggaattacatacaatgcggattaccagtatacgtcagtggtattgttgaacgcgattgagaatgcactggcgaaggcggaactctccggcgcagagacgggagagtagaagagcgtacatagaaaaatggcaggatggcagaaaaatacccgggtgcggaaaagtcgccccgggttcttttgcgttattcttctgtgcttaaggaattcatgtaatcggtgatggcatcgacattggcgtaaatggtctcaaccggcttcttgctctcatagatgcggtaaccggacacaccagcccagcctgcgagcgcgatgacaaccagccagccgcagacaacagcgagcagatgcaggcgcttctcctttgccatagtcttcttgcggttctttttctcttctttatagcggtctactttagcctgactcataatctgtctcctttatgtgttcaatctttattctctgcaaaataaagtaaaattccaagaaataatataacccatttgcgggaaaaatgcaacagaaatgcaccttgtcatttcacggaaaattgagtacaattaagaattagcagaatagaatggaagaaaaacgggaggaacggaatgagtctcgcagataagatttttgtggatatgtgtaaggatatactggaaaacggaaccagcacggagggggaaaaagtaagaccgcactgggaggatgggacgagcgcctatacgatcaagaaatttggcgtggtgaaccgttatgatctctcaaaagagttccctgcgatcacgctccgcaagacggcgatcaagacctgcaccgaggagatgctctggatctggcagcgcaagtccaataacattcacgatttaaacagcacggtctgggatgagtgggcggatgcggacggctccatcggaaaagcatacggttaccagctcggcgtgaagcaccagtataaggaaggcatgatggatcaggttgaccgtgtgatctacgatctgaaaaacaatccgttcagcaggcgcatcatgacaaacatctatgtacatgcggatctgcatgagatgaatctgtatccgtgcgcatacagtatgacgttcaatgtgacgcatcacccgggagatgagaagctgacactcaacgcgatcttaaaccagcgctcgcaggatgtgcttgccgccaacaactggaacgtctgccagtatgcggtgctgatgcatatgctggcgcaggtatgcgatatgaaggtcggggaactggtacatgtcatcgcggatgcacatatttatgaccggcacgtgccgattatcagggaactgatcgagagagagcagcatccggcaccgaagtttaccctcaatccggatgtcaaagatttttaccagttcacgacaaaggatatcacgatcgaggattacgtgacgggaccgcagatcaaaaatatcccgatcgcggtgtaagcacgaacagaaaggcgtaaaaaatgaatttaatagcagcagtggatcaaaattgggcaatcggcaataaaaatgagttactggtgagaattccggcggatcagaagtttttccgtgagacgacgaccggcaaggtggtggtcatgggaagaaaaacgctggagagttttccgaacgggcttccgcttaagaaccgcaccaatatcgtgctgacacacgatcatacctataaggttccgggtgcggttgtcgttcatgacatggatgagcttcatgaagaattaaaaaaatacgacagtcaggatatctatgtgatcggcggagagacgatctacagacagcttctggatgagtgcgacgtggcgcacatcacaaaaattgactacgcatacgatgcagatgcgtatttcccgaatctggatgagagaccggagtggaagattacggcggacagcgaggagcagacgtactttgatctggagtattatttttaccggtacgagagggtaaaataggcgggatggcgtagagatggagaattttatttacagtgtggatgcaacgtttccaatctttttagtcatggtgatcggttatatcctaaaacagatcgggatgttaaacgacaatttcgtcacggtggcaaaccggttcaactttaaggtgacactgccgtttatgctgttccgcgatatttccggcgtggatatccgggcggtctttgacatccggtatgtgctgttctgcgcgctcgtgagcacggcgtgcttctggatcatctggggcggtgtgaagctgtttttgaaggatcagagcatgcggggagcttttgtgcaggcgtcgttccgcagcagtgcggcggtgatgggactggcgttcatccagaacatgtacggaagctcggcaatgggaccgctcatgatcgtgagtgcagtgccgctctacaacattttttccgtgattgtcctgacgtttgaaggggcacattccggggaggtggatccgaagcagaagattaaggctgcctgcatcaacatcgcaaagaatccgatcattctgggaatcttggccggacttatcgtgggacttcttggcatcgattttccagtgatcgtggataagacggtgaacagcgtggcgcagatggcaacgcctctggcactcatcacgatcggagcgggatttgagggaagaaaagcactggcgaagatccgtccgacgattgtagcatccatgatcaagctggtcatccagccgctcatttttctgccggtcgctgcgtggatgggattccgtggggagcagatgatcgcaattctgattatgctggcatcgccgacgacgccgagctgctacatcatggcgaagaacatggacaacgacggtgtactcaccgcgagcgtgatcgtgatgacgacacttctggcggcatttaccctgaccggatggatttttattttgaagacagtaggattgatagggtaaaggttcttgatgtattttaatattcttgatttatctttggataggattgcatttgtgaaaaagatgggctatagttttttacaataatcctttctgcaggaaatggacggcagagagaaggtaaggaggacggcatggatattacaggcagaaagttatttgtgaaagctttgcaggaagaaggcgttaccaccctgttcggttatccgggcggaacggtgacggatctttttgatgaactatataagcaggatggtatcgaagtcgtcttacccagacatgagcaggggctgatccatgaggcggaaggatatgcgcggtcgacgggaaaagtgggagtatgtctggtcacgagcggaccgggagccaccaatatcatgacggggcttgcggatgcgcactacgacagtattcctctggtctgttttaccggacaggtgccgttatccctcattggaaacgatgcatttcaggaggtggatattgtcggcatgacgcggagcatcaccaagtacggcgtgacggtgcggaaaagagaggacctggggcgcatcatcaagatggcgttctacattgcctccacgggaaagccaggaccggtgctcatcgatataccgaaggacatccagacggcgccagggcctgcagagtatccttccagcgtgcagatccgtggttacaaaccgaatgagagcgtgcatgtgggacagctgaaaaaggcgtataagctgctgcgtgcggcaaagaagccgcttatactggcgggcggaggcattaacattgcacatgccaacgacaagctgcttcagtttgcggaaaaaatgcagattccggttgtgacgacgatcatgggaaaaggagcgatcccgaccgggcatccgctctatgtggggaacagcggtatgcatggaaaatatgccgcaaatatggcagtcagcaaatgcgacgttctgttttccatcggcaccagattcaatgaccgcatcaccggcgatttaaacgaatttgcaccgaaggcgaagattgtacatatcgatgtggatacggcggcgatctcccgaaatgtggtcgtggacgtcccgattgtttccgatgcaaacctggcgttagagaagctgctcgagtgggcggagtccaaagacactgcagcatggcaggcacagattgccgggtgggatgagaaaaatccgctcgagatgcgcagggaccacggcatgacgccgcagatgatttttgagcatgtgaaccggacgttcggagaggcggtctatgtgacggatgtgggacagcaccagatgtgggcgacacagtatctggaactggattcctggcatcagttgattacctcgggaggtcttggcacgatgggattcgggcttccggcggcgatcggtgcaaagatcggcaatccggacaaggaagtggtctgcttttccggggatggcggtctgcagatgaacattcaggagatggcgacggcggttgtgcaggaggcgccggtcatcatctgcgtgtttaacaattactatctgggaatggtgcggcagatgcagcagttattctacggcaagcgttatgaggcaacctgcctgcgcagaagaaagggatgcccggcgaactgcaagggaccgaacgcatcctgcccgccgtacacgccggattttattgcacttgcaaaaagctacggggcacacggaatccgtgtggagcgcgaggaggatatccaggcggcgttagatgaggcgcgcacatacaaggatgcgccgactatcatcgaatttatgatcgccaccgatgagatcgtgcttccgatggtgaagagcgggaatccgatgagtgaaatgatcttgaaataggaatggagacttactatgaagaatcgctggattgcattatatgtggaaaatcaggtcggtgttctggctaaggtgtccggtctgttttccggcaaatcgtataacttacagagtctgaccgtcggcacgacggaggacgagaccgtttcccgcatgacgatctgcgtgacgagtgacgacattacctttgagcagatcaaaaagcagctaaaccgtatggtagaggtcatcaaggtcattgatctcaccgatgtgccgatccatatgaaagagattctgtttgcgaaggtgcttggcatcaatgcggcggaaaagcttgaggtgttccagatagcgcaggtgttccatgtggaggtatcggacgtcggaaacgacagcgtgctgctggaatgtaagctgacagagcggcgcaacaacgaactgattgccctgctccgctcaaaattcaagagaatcgaagtggtaagaggcggtgctgtggcgattgagtcgatcagtacctcctgccgctagcatcagaggggaattgttgcaatcagcacagagtgtcctttgagtgataggtaatatataaaaagattacatctttcaatttcagatggaatgcatatgaaaattctgttcaaaaatgcggcatttctaaccagccggatatttgcatccgcgatgatccgtgtctttccaagtttggaannnnnnnnnntccgaagacaatttgtaggacttttgtgccgcccttacctgtactcccgcaataagacataaccgcgcgaagccgatgtttgaattgccatctgccttgtttttaatagcagatggcaacgagtttcggttcgcgcggttttatattgtctatgagggagtacagttagggcggctaaaaagtccgcccattgtctttggcgtgtcggacatgtccccgttggattgtccaaacgtggaagagacacggaatccgatgcaaatatccgtcaggaagaaatgctctcattttttcacaaagaatcttccatatgcatttccatctgaaatctgtaagatatacttctccaaatattacctgtcactcaaaggacactccctgctgattgcaaaagttccgttctgtgctggcgcggcatttaaacgcgttttttcaggaaggcaataaatttttcaaaatgcatcggcgttccctgaatctcctgcactttcaggcggttcgcctcggagaatccgactaaaatattgtggttcgcctcggcgaggtaatccatgataccgtcgatgtccgacttgatgttcttcgggcactggatgtagagatgccggttcgcactgatatgcagcgtgtaggagatgctgaagtggtaccagaaaaacttgtggagcgtcgagtatttgtagatccagatgatctcatcgatcggtacaatggcattgccgtacaccgaggtctcgatgaagaaatgttctgtgataaacatatcctccgttgcaagctgcggcagcgtcgcaagttcatcctctgcctgctccaaaagctttttcggatttccgaacagcgcgagatcctggcacgcgggcgagagaattggaaagcagatatagaggatgaaaaatacaatgcagatcagggcatagccgccggtcgcaaaaaatacgacgtagagcagcgtgtttccgagcagattgtaatcaggctcactcagtacatactgggagactttgttgtgaatgccgttttcggtccagttcagatccgaagcgagatgatttaacagctcatcaaaattctcggaaccgtgaagaatcttggcacggacggacacctgcggaatctccggaagtccctgttcactggtattcggggagagcagcacgatgatgcactcgtcattccgcatcgtgtaatagtagtaaccgctgatgtgccctagaaaggactgggtgtaaccggtgaacttcagattggataaggtggcggatatgtattcttcatgccgtctgtaggtgctctcgagggtatccggggcatcgagcgtgtccggaaaaagcggcgctgacagcgagagaacgaaccacagtaccagaagaaaaatcagatacaggatcggtgtcagcagtctgcgcttgtagaatgcctttatatttttggtgatatagtgttcaaactgatcgggcataggtataagatcctttgctgtattttgctgtgtttccgaaaacatcggaaaaaacgacattttatggaataagtatacggtttaccggaaaaataatcaagaagatttgtgcgggggaatctgtcggcaaaccttgatttcacattggaaacttggtagtattacatagaaatgttccgcatgctggcggaagagaaagtgagaacgatatgggtgcatacgagagctttgcgagagtgtacgatctgtttatggacaatgtcccctatgaggaatggggttcctatcttacggggctgctccgggaatacggcatctgcggcggaacggttgcggagttaggctgcggcaccggaaaaatgaccaggctgctggcggcggcagggtatgatatgatcggcgtggacaattccgaggagatgcttgagattgcgcgcgaggcagagtatgaggcagatgcgtgggacgagtcggaagagtcagacgagccggcgggtcgtggaattctctatctgctcgaggatatgcgtgaactggaactgtacggaagcgtgtgcgcggtggtgtcggtctgcgattccatgaattatattttggaggaagcggatctgcgcgaggtgttttcgcgtgtgcacgagtatctggaggaggatggcatctttatttttgacctgaatacggtatacaagtaccgggatcttctgggagagacgacgattgcggaaaaccgcgaggagggcagcttcatctgggagaattattttgatgaggagagtgccgtaaatgaatacgatctgacgctttatatccgcgaggacggtgaaacctaccgccggtttgaggaagtgcattatcagcgggcctatgatttaaagacgattggcagactgcttgcggatgcgggaatggagcttacggcagcctacgacgcgttcacaaaggaaccggtcagggacgactcggagcggatctatgtggtggcgcgcccgcgcaggtagaaggctttgagaagatacaggaacaacgaatccgaactgagtagaaaaagatacagtatatgaaaacggagcagaaagaaaagataccgtgcatgaaaacggagcaggaaaagaagatgtagcaaatccgaaatacagcaacaatagaaaaggagaacgaaatgagtcaggatagagattatattgtaagagctaccgcagcggagggaagtatccgcgcatttgcgatcacatcgcgccatctggtggaggaggcgagagtggatcatgacaccagcccggtgattacggcagcgctcggcagacttctctccggtgcggcgatgatgggaacgatgatgaagggggagaaggatcttctgacgatacagatccagtgcggcggcccggcgaagggctttacggtgaccgcggatgcaaacggacatgtcaagggattcccgaatgttccggatgtggaactgccgttaaatgcacagggaaagctggacgtcggcggtgcgctggggcttggcgtgatgagcgtcatcaaggacatgggattaaaggagccgtacgtgggacagatcgcgctgcagaccggtgagattgcggaggatctgacgtactattttgccacctccgagcaggtgccgtccgcggtaggactcggtgttctcgtgaatccggaccggtcggtcagacaggcgggaggatttatcatccagctgatgccgtttacaccggacgacgtggtggatcgtctcgagaagaagatcacggagattgcctccgtcacggagatgctggaagatgggaagacaccggaggagatcttggagctgattctcggcgagttcgggcttgagatcaacgatacggtggatgccgcattccagtgcgactgctccaaggagcgcgtctcccgtgcgattgcgacactgagcagaaaggatctggacgacatcgtaagcgacggagagtcgattgaggtaaaatgccagttctgtaacaaagcgtaccattttgacatcgacgagttaaaggaaatgagaaaatgagagatggatttgtaaaagttgccgccgtcacaccgaagatccgtgtggcggacacaacatacaacgccggcgtgatcgtggaaggaatccgggaagcggcggtggcaggcgcgaaggtgatcgtgctgccggagcttgtcatcacgggatatacctgcagtgatctgtttttgcaggaatatcttttagagcaggcgaagcgggcgctcggaacgatcgcggaggagacagcagaggtggacgccatcctttttgtcggtctaccgcttgcgtacaacggaaaactttataatgtggcagcggtgctctgccgcggggaagtgctcgggtttgtgcccaaaacctatcttccgaactacaatgaattttacgaggcaagacattttgccagaggaatggcagatccggtcgaggtcgatttcgagggagagtgtgtgccgatgggcacgcggcttttatttgtctgtacgtccctgccagaattaaagatcggcgcggagctttgcgaggatttgtggacgccggagccgccgagtatccgtcatgccagaaatggtgcgacgctgcttgtgaatctgtccgcatcagatgagaccaccggaaaggacatctaccggcgggagctggtaaacggacagtcggcgagacttctgtgcggctatatctatgcgagtgcgggagacggggagtccacgcaggacgtcgtctactccggacacaatgtgattgccgagaacggtcatattctaaaggaatcggagcggttcggaagcggtgtgatctgcacggagatcgatgtcaagcggatcgaggcggagcgccgccggatgacgacgtttgagatggcggaggacggctatgtggaggtgcgtttttctcttgaaacggaggagacggctctgacccgcttcatcgacccgatgccgtttgtgccgggaaatgaggcggaccgtatcagacgctgtgatgagatccttgccattcaggcagcgggattaaaaaagcgtctggagcatacgcactgtaagacggcggttgtgggcatttcgggcggtctggattccacgctggcactgcttgtcaccgtgcgtgcgttcgatctgctcggcatcccgcacgaccggatcaaggcagtcacgatgccgggcttcgggacgacggaccggacctatgacaacgcggtgtccctgatccggtgcctcggcgcggattttacggaagtcgacatcaaggaagcggtgaatgtgcatttccgtgatatcgggcaggatccggccgttcatgatgtgacctatgagaacggccaggcaagagagcggacgcagattctgatggacattgccaacaaggagggcggcatggtcatcggaaccggcgatctctcggagcttgcactcggctgggcgacatataacggcgaccatatgtccatgtatgcggtcaatgcctccgttccgaagacgctggtgcgccacctggtgcgctactacgcggatacctgcggggatgagaagcttggcgcggtattgacggatgtgctggacacgccggtatctccggagcttctgccgccggaggacggaaagatctcgcagaagacggaagatcttgtgggaccgtacgagcttcatgatttttacctgtaccacatgctgcgtcttggatttgcaccgaaaaaggtgtaccgtctcgcaaaagtggcgtttgacggcgtctacgacgatgagacgatcttaaaatggctgaaaaccttttaccggcgcttttttgcacagcaattcaagcgttcctgtctgccggacggaccgaaagtcggtagtgtggcggtctctccgcgcggggatctgcggatgccgtcggacgcgtgtgcggctgtctggctgcagcagttggaggagatcggatgatcatgcagtatcgcaaggataaaaacggaaatgagatttcggtgctcggctacgggtgtatgcgttttaccaaggagggcgggcatgccgatatcgataaggcggaaaaggaggtcatggcggcgatagatgccggtgtgaactatctcgataccgcatatgtctatgccggaaatgaggcggcggtcggggagatcctcgcgcgcaatcattgcagggaacgcatctacctggcaaccaagctgccgcactacctgatcaagtcggtggagggcgcccagaagatgttcgaggaggagctgcgccgcttacagacagattatattgattactatctgatgcatatgctgacggatcttcccacctgggaaaagttaaaaaagcttggcatggaggactggatccgggagaaaaaggcgtccggagagatccgcaacatcggattttcctatcacggcagatcggatatgttcatgcagctgatcgacgcctatgactgggatttctgccagatccagtataattatatggacgaacattcgcaggcgggcgtggatgggctgcgctacgcgcacgcgagggggattccggtgattattatggagccgctgcgcggcggcagactggtcaatctgctgccggagtcggcgaaggagctgttcgcacaggatgaggagcaccgcaccccggcagaattggcactcaagtggctgtacgaccagccggaggtgacctgcgtgctctccggcatgaattccatggagatggtcgaacagaatgtgcgcacagcttcggaatacggcgtcgggtgcatgacggagtcagatcgcgcgctggtggaagcggtgcggcaggagatcacaaagcacgtcaaggtgggatgcaccggctgcggttactgtatgccgtgcccacgcggggtggatatccccgggacattccgctgctacaatgcgatgtactccgaaggaaaaaagtccggccgcagggattatctgcagtgtacggcattccgcaagaatccggcgagcgcctcacagtgtgtgggatgcggcaaatgcgagcagcactgtccgcagcatatcgagatccgaggggagttaaaagcggcggcgggagaactcgagacggtgaagtacaagttcatgaagacggcaatcggcgtgctgaagctctggtagaaacacatggcaggaataaattctatatggtaaatcggaaaagtgtgtgttatactacagtgcagatacaaatgagaggaggactttgttatgaaaatgaagtttggtattaaggaagttgttgcaaccggtattggcaccgcgctgttcgttgcgctgacagaggtacagatccctctgggatttatcccgaacaccgcattacagccgagagcggcattgctcgcattccttgcagccgtattcggtccggtagtcggcggtattgtcggtcttctgggacatgcaatcggtgatgcactgttttatggaagcgtatggtggagctgggtattcccggatgcggtattcggtattctggtcggacttttcgctgcaaaatatgcgatcaagaacggcggattcgagaagaaacagatcgtgctgttcaacgttgtgcaggttgttgccaacctcgctgcatgggtgatcgttgcgccggtacttgacattgtgatctacgcagagcctgccaacaaggtatttgcacagggtgcatgggcatgccttggaaacgtgattattattggtattcttggtactttgatcgcagcaggatactccaagatcggagcaaaatcgtccagtctctccaaggaggactaggcggattccggcagcagcagaaagacagaagcagacagagtgcgcggagacggggtgcaaaatgtgaccggttccgcgcactttttcttccatttggaattattatcaagtataatagtcgggaagtaccacaagagaggaagacgaggatttcggaatggaaccgatcatagaatttcagaatttttcttttaaatatcgttcccagaaggaaccgacgctaaaggacatcaatctcgccatttatccgggggagaaggttttgattgtcggaccgtccggttccggaaagtcgacactggcgcactgcatcaacgggcttgtgccgttttcctatgccggagacatcacggggacttaccgcattaagggcgaggatcccgcaaagcttggtatttttggactgtcgaagtctgtgggtacggttttgcaggacacggacggtcagttcatcgggcttacggtggcggaggatatcgcatttgcgctggagaatgacagagtggaatatcacgagatgcgcgggcgcgtggacaaagcggcggacgctgtggatgtaaaagacctgctcgatcatgcaccaggagcattgtctggtggacagaagcagcgcgtatccatggcgggcgtgctggtctgtgatgtggatatcctgttgtttgacgagccgcttgccaatctggacccggcgacgggaaagcgcacgatcgctttgatcgatgagctacagaaggcaaaaggggcaacgatcctgattattgagcatcgtctggaagatgcactgtaccgggatgtggaccgcatcatcgtcgtcggtgagggaaagatcgtggcggatacgacgccggatgaacttctggcagccaatgtactggcggaggagggaatccgcgagccactctacatcacggcgcttaagcatgcgggatgcgagatccgtcccgagacgcatccggcgcatgtggagacgatggaattgtccggttataaggaggcgctgtgccgctggaacgagaaggttgcactgccggagaaaaaaccgggggatgacgtcatcctctcggtggagaatcttgctttttcctatgacggaagaacgccgattctaaccgacatccatatgcaggtacaaaagggcgagatgctggcgattgttggcaagaacggtgccggaaagtcgacgctctcgaatctcatctgcggctttttaaagcccggtcaggggcggattctgtttggcggcgaggacattgcagactggtcgatcaaggagcgcggcgagaagatcggacttgtcatgcagaatccgaatcagatgatcagcaaaccgatgatctatgatgaggtggcgctgggacttgcggtgcgcggcgtgcccgaggaggagattaaggagcgggtctatgcaaccttaaagatctgcggcctctaccagttccgtaactggccggtctccgcgttaagcttcggtcagaagaagcgcgtgacgatcgcttcgatcctcgtgctgcatccgcaggtgctgattttggacgagccgacggcgggacaggactacagacattatacggagatcatggagtttttaaagaagctgaatgaggagtacggcattacgatcatcatgatcacacatgacatgcatctcatgttagagtatacgaaccgcgcggtcgtgattgctgacggcaggcttctggcagataccgctccggcggcggtactcacggatgacgcggtggcggatcgtgcctatttgaagaaaacatctctctacgatctggcggtgcgctgcggcattgcagagccgacacagttcgtggagcgctttatcggctacgagcggcagatgagagcggcggaaagagaggaggaagcataatgtcgcgcgtattatcatatgaagaaaaagacacatggattcaccgtctgagcggggtgacaaagcttttgtttttcctcctgtggtcgatcaccagcatgatctcctacgatacgcgggtgctcttggtcatgcttgtgtgcagcctgattatttttgccatgtcgaagacgaagtggaagcaggtcggtacggtattcaagttcatcatgttttttctggtgatcaatctcatcgccattttcttcttttctccgggacaggggacgaagatttacggaacggagacgccgatagtgcatctgtttggacattacacgctgacaaaagagcagctgttttatgagttcaacgtgatggtaaaatacctgacggtcattccagcggtgttcatgtttatcgtggcaacgaatccgagcgaactggccgcttctttaaaccgtgttggtgtcagctacaagatcggttactccgtggcgattgcgctccggtatattccggatgtgcaggatgattttgcaaaaatcaagcacgcccaggaggcgaggggaattgagatgtctggcaaggcgaagctcggcgaccgcatcaagaacgtggcggcgatcattttcccgctggtattctccagcatggaccgcatcgacgtggtcagcaatgcgatggagctccgtgggttcggaaagcacaagaagcgcacctggtatatgggaaagccgctggcggcggcagactatgcggtgctgattgtgacggcggcattttccgcggtggcactgatgattaccttcagcaacggaagccgtttttacaatccgtttgtgtaattaaaatggaagaaagcgggtttagaatacgatggaacaaatggaagcattaaaacagtcgatccgggaaaaagggaagatggttgttgcattttccggcggtgtggattcgacattcttattaaaagtggcacatgacgtgctgggagatggggcggtcgcagtgacggctcgctcctgttcctttccggagagagaattaagagaggcaaaagcattctgtgagaaggagcacataaaacatatcgtggtggagtcggaggaattgcagattgagggattttcccataatccgaccaaccgctgctacctctgcaagaaggagcttttcacaaagatctgggatattgcaaaggagtacgacatcccctacgtggcggaggcgtccaatctggacgacaacggcgattaccgcccgggactgatggcggttgccgagctttccgtgcttagtccgctgcgcgaggcggggatgaacaagagcatgatccgcgaactctcccacgggctggggcttccgacatggaataagcagtcgtttgcatgtctttcttcccgctttgtctacggggaggagatcaccgaggagcgccttggcatggtggaccgcgcggagcagcttctgctggatgccggatttcatcaggtgcgcgtgcggattcacgagagcggaacgaacacgattgcccgtatcgagatcggcacggaggattttgcaaaaatgtttgcagacgatttttaccagaaggtcaatgcggcatgcaaggagatcggttttacctatgtgacactcgatctcggcggataccggatgggaagcatgaacgacggcatccggaaagcataatattaaaactgcatagaatatagaaatagagtaacagaacaaaacagaaggattctctgacacagaatgcttctgtttctttttttagaacaaaaagaaattatttaatttcctacttgacatatatataaagtaggagtatatttcttatatcatataaaacagctaggaataataagaaataagataggatgtgaaaatgtgaactgggaagttatctcgcaatacctgccgctgtatcagaaagccatgtggctgacactccggatcggctggatgggaattgcattttcaatcatcattggtcttatatgtgcgctgattgtacattataagataccggtggcgagacagattgtaaaaatatatatcgaattgttccgcaacacaccgcttctggtgcagctcttttttatctatttcggactgccgaaggtgggactttccatctccgcggatgtctgcggcgtggcgggtctggcacttttgggaggaagctatatggcggaggcgttccgcagcggactcgaggcgatcgagccgatccagatggagagcgcgttaagccttggcatgacgaaaaagcaggcagtgctctatgtcatcctgccacaggcggtatccatcagcgtaccggcatttgtggcgaatgtgatcttcctgttaaaagagacgagtgtgttttcagcaatcagtctgatggatctgatgtttacagcaaaagacctgatcgggctttactataagacagcggagtgcctgttcttactggtggtattttatctgattattttacttccggtatccatccttggaacgttgttagagaggaggctgcgctatgccggatttgggaattagtgtcctgtttaagggcaagaacatgataagacttctgggcggtctgtgggtcgcccttaggatcagcctgatctccgtggtcatcagtattccgctcggcattctgctcggcatcgtcatgacatggaagaatccggtgacaaaagcagtgacaagagtgtatctggagattgtccgcatcatgccgcagatggtactgctgtttctcgtgtttttcggaacgacgcggatgtttggctggaatttatcggcggagtttgcatcggtaatcgtatttacattctggggaaccgcagagatgggagatctggtgcgcggcgcgttaatcagtatcccgaagcaccagtatgagagtggtgcagcgcttggaatgacgagaagtcagatttatttttacattattatcccgcagaccctgcggcgtctgatcccgctgtcgatcaacctggtcacccgtatgattaagacgacaagccttgtgatgatgatcggtgtggtggaggtgttaaaggtgacacagcagatcatcgaggcaaaccgtatggcatcgccgaatgcggcgttcggactgtacggaaccgtgtttgtactgtatttcctggcatgctggccgatcagtatgctggcgggacatctggaaaagaaatggagtaactgatatgaaggcagaagcagaagaattgttaaaaattgaacatatcaaaaagtcctacgagggaaatgagatcttaaaggatctaagcctgaccatccacaaaggagaggttgtggttatcatcggaccatccggatgcggtaagagcacactgcttcgatgtatcaacgccttagagccgatacaggagggaagcattacactccgaggcgagaccatcgacggaaaggcgaagaatatcgccgggatccgccagaaggtcgggatggtatttcagagttacgagctttttccacacaagacgatcctggaaaatgtgatcctggcgccgcttaaggtgcagaagagaacaaaagaggacgccgtttctgaggcaaaacagcttctggaaaaagtagggattctcgacaagtgtgacagttttccgagacagctttccggcggtcagaagcagcgtgttgcgatcgtgcgtgcactgatgatgcaccccgagattatgctgttcgatgaggtgaccgcagcgcttgatccggagatggtgcgcgaggtactggatacgatgttagagcttgctaaggcaggaagcactatggtgatcgtcacacacgagatgtcctttgcaagggcggttgcagaccgtgtggtctttattgaccagggagagattgtggaagaaggaaagccggatgaattttttacccatccgacgacagagcgtgcgaaaaagtttctgcacacatttgaatttgaggcagtccgcgactagagagcggcacaaaaggttgattctgaagcttcgatggaagtttggaatagaaagagaggacaatattatgaaaaaagaaagattaacgaagagactggcactgtttacagcactgacattaactggagcaatgctggcaggctgtggcaatacagatgcagcggagagcagcagtgatgcgcagacaggagttaccgcagatacacaggcagccgcaggcgatgcatccgcagatgtggtataccgcaccttagacgagatcaaggagagcggcacaatcaacatcggtgtattttccgacaagaatccatttggctatgtggatgagaacggagagtatcagggatatgatgtctactttgcaaaccgtctggcagaggatctcggcgtggatgtgaacttcgtttccaccgaggctgcaagccgtattgagtatttacagaccggaaaagtagatgtcattctggctaactttaccgtgacaccggagcgcgcggaggaagttgattttgcactcccgtacatgaatgtatccctcggtgtgatttctccggattctgcagtggttgagagtctggatgatctgacagcggatgatccggtgatcgtgatttccggtacaacagcagagacctacctgaccgagaactatccggatctgaccttacagaaatatgattcctatgcggcagcaaagacagcgcttgagaacggaagcggtgttgcatgggcaaatgacaacacagaggtcattgcatttgcactccagaacccgggctataccgtaggtataccggagcttggaagcacagatacaattgcgccggcagtcagcaagggcaacacgaccgtattagactggatcaatgaggagatcaaggcactcggcgaggagaatttcttccacgcagattacgaggcaacactggctgacacttacggcagtgactacgaggatacgcttgtggtagagggcggcgagacaaagtaagaactgaccatgtaacggaaggttcaaagcacaggggactgcgtctttgagccttctttctctataggaaaagaggtagtgtatggaaaaaaagaacagaaacggcagaaaagtcatggcagcatttctcacagtatcccttgcagtgggaatcctgggcggctgcggacagacggcggcagatactgcggatgcaaaggaagtggagattacgaatgtttcgtacgatccgaccagagagctgtacgaggcgtacaatgcgctgtttgcggaacactggaaggagcagatcggacaggatgtgtcggtcatccagtgacatggcggctccggcaagcaggcacttgaggttgcaaacggtctggaagcagatgtggtcacgctggcactggagggggatgtgcaggtagtcgcagatgcgggactgatcgaggacggctttgcagatgagtttgaacaggagagttctccgtacacctcaacgattgtttttctggtgcggaaaggcaatccaaagtccattgaggactgggatgatctgctccgggaggatgtgggtgtcatcaccccgaatccgaagacatccggcggtgcacgttggaattatctggcggcatggtactattttgagagtcaggggcagagtgaggaagagattaccgagaatatgaaaacgctttatcacaatgtgctggtgctggattcgggggcgcgcggcgcgacgaccacatttgcggagaacggacagggcgatgtcctgattgcgtgggagaatgaagcatttttgtcgttggaggaacatccgggcgagtatgagatcgtggttccgtctgtatcgattctctgccagccgaccgtggcactcgtggacgaggtcgtcgatgaccgtggcacaagggaggttgctacagagtatttagagtatctgtattccacagaggcacagaagctcgaggcggagaacttctaccgcccgtcggatccggatgttttttccgattatatcagtacatcgggggagcgcgtcatcacggaactgccggcagacggaaaatggatcgtggatgacattgcactcacggatattgcgcactttggtggatggagtgaggcgtcggcgaagcatttcgcggacggcggagtgtttgacgcgatttatgaacagtgattaggaaatttacagggaacgcccggcagagctatctgccgggcgttaaattgtacagaatgaagtacaatacctcccgcaggtatttttgctgttgacaaataaaaaaaatgatactagtataaatcatatcatatgggtatgatatgaaataaaaaaggaaatggtacgagaatatggaaaagaaacttatttacatggataacgcagctaccacaccggtcaaaccggaagtgcttgatgcaatgcttccgtactttacagagaagttcggtaatccatccagcatatacagcatttcttctgagaataagaaagcaatcacggatgccagagaggtcattgcgaagaccatcaacaccacgccggagaatatctattttaccgcaggtggttccgagtctgacaactgggcattaaaggcaacggcagatgtctatgcgtccaaaggaaagcacatcatcacgacgaagatcgagcatcatgcgattcttcacacctgtgagtatctggagacgaaaggcttcgagatcacttacctggatgtggatgagaacggtctggtaaagctggacgagcttaccgcagccatccgtccggacaccatcttaatctccgtgatgttcgcgaacaacgagatcggaaccatcgagccgattgctgagatcggtaagatcgcacatgagcatggcgtactgttccacacagatgcagtacaggcatacacacaggtgccgatcgatgtcgaggcaatgaatatcgatatgatgagcaccagcggtcacaagatcaacggaccgaagggaatcggtttcttatatatcagaaaaggtgtgaagatcaaatcctttatccacggcggagcacaggagcgccacagaagagcaggtaccgagaacgtaaccggtatcatcggtcttgcaaaggcagcagagatcgctacggccaacatgaaggagcgcactgcggaggagatcaaagtcagagatcatttgatcgagcgcatcgagaaggagattccgtatgcaaagttaaacggagaccgtgtgaagcgtctgccgaacaacgtgaacttcagcttccagttcgtagagggagagtccatgctgattcttctggattccaagggaatctgcgcatcaagcggttctgcatgtacatccggttccctggatccgtcccatgtacttctggcaatcggactgccgcatgagattgcacacggttctctgcgtctgaccatcagcgaccagatcacgatggaggatgcggactacgtcgttgacaacttaaaagagattgtgaaccacttaagagagatgtctccgctgtacgaggatttcatcaagaaaaacaaataatataaaaaagaaagcaggtatatgttatgtatagtgaaaaggttatggatcattttcagcacccgagaaatgtaggagagattgaggacgcaagcggtgtcggcaccgtcggaaatgcaaagtgcggcgatatcatgcgtatgtatctcgatattgatgagaaccaggttatccgtgactgcaagttcaagacattcggctgcggcgctgctgtggcaaccagcagtatggcaacggagcttgtaaagggcaagaccatttacgaggcgctgcagatcacgaacaaggcagttatggaggcgcttgacggacttcctcctgtaaaggtacactgttctcttctcgcagaggaggcaattcatgcggcactctgggattacgcagagaagcataacatcaagatcgaaggtcttgagaagccgaagaacgatatcagcgaaggtctggaagaggaagattactaagaatgaatcggcaggatgaagcggactatacggcattaaaagaatatttatgcgacatgatcttagaggaacagctaaagctcggctatgagcgtgagacgatccggttttattcaccatcgtcgtcaatcggacatgtgttaaagctgtctgaccgctccaagccggcggttcttgcggcgctggagggatttggcgcatatgcggcggataccctcggtgaagtggcagtatctggggcgagcggcgggagaatctgttttctcattcctgcagcgggtgcggagtatgtgcatgcgcacggcgtggcgcatccgttcttaaaggatctgattgactgcttcggcagacatgatgtgacgagagagcaggtgtgggagctgttccggcactattctaagagtgctcgtatcattgagatcaaaagcgatgaatttgatgacgtgtgctactttgaggatggcaatccggattcttatctgtactgcgtcaagttcgacgagggacatgcgttttatcaccgcttcttaaaagaggattttgaagagctgttcggtgaagccagcaggatgaaaggggcccgatagcatgaaaattacgacaaagggacgctatgcgatccacatactgtacgatctggcggtcaacggcacggagcatccggtgtcggtcaaggagatggcaacgagacaggagatttccgtcaaatatacagagcagatcatttccattctgaacaaggcgggctatgtttccagcagccggggatttcagggcggctaccgtctgacgaagccgttggacgaatatgtgatcggtgatattctgcgtctgacggagggatcgctcgcgccggtcgagtgtcttgcgaacgccgagaatccctgccccaaacagcagaaatgcgcgacgatcatgctctgggaaaaagtcgataaggcgatccgggacgtggtcgatcatgtgacattgcaggatcttctggactggcagaagcaggaaaggtgttagtgtgaacgaatatgaaaatttctacaaaaggcagatatgcgctgcgcctgatgctggatctggcgatgaacggtgagaacaacgttgtgcgcattaaagatattgcggaaagacagcagatctcagacaaatatcttgagcagatcatatccgtattgaacaaggcaggttatgtgcggagcaccagaggaccgcagggcggttattcgctgcggaaagcaccggaggaatacacggttggcgatattttgcgtctgacggagggatcgctcgcgccggttgcctgcgtggaggaggaaggaagttgcgaacgcgaagtggattgcgttaccgtggaggtgtggaagcggctgaaccaggcgatcagcgatgtcgtggatcatatcacactggcggatctggttgcactgcaggaagagaagcgcgagaagagcggtcttgactttggaaaagatatctgagttatcatatgatacataaaataagaagaacccctgttatggtgtttgcagccaccgtagcagggggtcttcgcttaagaagggggttttctcggtttattcaccaaaacccatgccgataaatatcgacgttgatatcatatcatattctggggaaaaatccagtgtaaaattgtgaaattttgctcatatatgcgcggtttgcaaataaattgcgtggtttttgcgaactgcgattcccttgacgttttccggttttatcccttataatattgcagataagtgatgcgtgtggctgccggagggcagaagtgatgcgcaccgggcaggaggaaatgaatgtcgattgaccagagtaaaatcagaaatttttgtatcatagcacatatcgatcacggtaaatctacacttgccgatcgtattatagaaaaaacaggaaccttgaccagcagggaaatgcaggcgcaggtgttagataacatggatctggagagagagcgcggaattacgatcaagtcgcaggcggttcgcattatctacaaggcgaacgacggcgaggaatatatttttaatctgatcgataccccgggacatgtcgattttaactacgaggtatcgagaagccttgcggcatgcgacggtgcgattctggtcgtggatgcggcgcagggcgtggaggcacagacccttgcgaatgtgtatcttgcgttagaccatgatctggatgtaatgccggtcatcaacaaggtcgacctgccgagcgcgcagccggacgaggtcgtaaaggagatcgaggacgtcatcggaatcgaggcggaggatgcgccgcgcatttccgcaaagacaggactcaatgtcgatcaggtgttagagcagatcgtacagaagattccggcgccggccggcgatccaaaagcgccgcttcaggcgctgatctttgacgcactctatgattcctacaagggtgtcatcgtgttctgccggatcaaggagggcacggtgcgggtcggcgatccgatccttatgatggcgaccggggcgcagtccgaagttaccgaggtcggttactttggagcagggcagttcattccgtgtgacgaactgtctgccggcatggtcggctacatctgtgcgagcatcaaaaatgtgcgggatacccgcgtgggtgatacggtgacgaacgccgcacatccgtgtgaggagccgcttccgggttataaaaaagtcaatccgatggtatactgcggcatgtatccggcggacagtgccaaatatccggatctgcgcgatgcgttggaaaagctgcagatcaacgatgcgtcgctgcagtatgaaccggagacgtcgctggcgctgggcttcggattccgctgcggtttcttaggactgcttcatctggagatcgtgcaggagcgtctggagagagagtttcatctggatctcgtgacgacggcaccgggcgttatctataaggtgcacaagacgaacggagaggtgatcgatctgacgaacccgtctaatctgccggatccgtccgagatcgagtatatggaggaaccggtcgtttcggcggagatcatggtgacgagcgagtatgtcggcgcgattatgacgctttgccaggaacggcgcggtgtatacaacggtatggagtatctggaggagacccgtgcgctcatcaagtacgatctgccgctcaatgagatcatctacgatttctttgacgccttaaagtcccgctcgagaggatacgcttcgttcgactatgagctgaagggctatgagcgttccgagcttgtgaagctggatattctgattaacaaggagcaggtggacgcgctctcgttcatcgtctttaaggacagtgcttacgacaggggcagaaagatgtgcgagaagttaaaggaagagattccgagacatctgtttgagattccgatccaggcggcagtcggcggcaaggtgattgcccgtgagacagtcaaggcgctgcgcaaggatgtgcttgcaaagtgctacggcggcgatatttcgcgtaagaaaaagcttttagagaagcagaaggaaggcaagaagcgcatgcgtcaggtcggaaatgtagagattccgcaggaggcattcatgagcgtcttgaagctggatgaagattaaaggaacagatcggaaaatgcagcgtcagtgatggcagtgtcaggaatatttttgggaaaggagcggtatgtggagtgagtcagaaaacaatggaattgtacattcatattccgttttgcgtcaaaaaatgccagtattgtgatttcctttcctttgcggcggacgaggcaacgcaggcagcctacgtggaggcgctgctccgggagattgcgtattacggaccgcattgcagcgactacctggtatcgacggtatatatcggcggcggcacgccatcgtggctcacagaggagtggatggcacagattatgtcggcggttcgccggtcgtttcgtctggcgtcggatgcggaaatatccattgagtgcaatccgggaaccgtcaccgatcacaagtttgccggctaccggaatgcgggaatcaaccggatcagcatcggcctgcagtcggctgtggatgaggaattaaagattctcgggcggattcacacgtttgaccagttcctgaagacttacgagctggcgcgcaaaaacggattcgacaatgtcaatgtggatattatgagttctcttccgggacagacggcagagagttttgcccgcaccctgcagcagcttctgtggctgaaaccggagcatatttccgcctattccctgatcattgagaaggggacgccattttacgatctgtataagtttgacgcggtcaagcagcaggcgggaatgcagacggtggcgctgccgacggaggatgaagtgtaccggatgaccaagctgaccgagcaggtgcttgcggaagcgggatatgtgcactatgaggtttctaattttgcaaaaccgggttatgcgtgccggcacaatatcggctactgggagcgggagaattatctgggactggggcttggcgcgtcgtctctgatggagaatatccgctacagcaacacgcgggaattgtatgtgtatctggaagaaaccagacatattcgtgagggtatctgggagaatgagataacggatagccaggggagcggcgcatccggcagggtggaacagcttccggccacgaatctgcatgcttcggcagagcgcattacacgaaaagggcagatggaagagtttatgtttttaggactccgcatgatggagggaatttccagggaacgttttgcacagacgtttggaacacagattgaggcagtgtatcaggaggtgctgctgcatcttacggaggaaggactgctcgaaaaacgcgcggggaggatttatttgacggaacgcgggcaggatgtgagcaattacgctctggcacagtttttactttagaacgatgaatccggacggattcatattaagaaattcttcataaagattcattcgcgttttcacggaaagaggactaaaatagaatcgtaggaatccaaggagtgaagtgatgtgaatgtaacaaagagacagaaaagacgaattcggaatctggtatgtatacagtacagtattgtgaaaatgctgctcgtgatcgcagggtttgaactgttgggacgggggctgtccctgatgcagggaacgcagtctgcaacgcaggagattgagggagaggtaatctggtcggaggagacgaaaacagaggagaatcccctgatcgtgtgcgtggatgccggacatggcggaaaagacaacggctccgattataaggggcgttatgagaaggatgataatttaaagctggcacaggctgtgtcagcttatttggctgataaaaatgtaaaagtggttatgacgaggtcggatgacacgtttttgcgcctgtcagagcggtgcgggattgccaatcagagcggtgcggattatatgctgtcgctgcaccgcaatgacggcgagggtaacggcgtagagacctggatctcggcgagtggttcggaggagacggatgccctcgcaaaccacattatggaagtgctggatacggcgggaatccagagaaaccgcggcgtgaaaaagggaacccagactggagaatcctccaattattatatcaatgtacattcggacatgccgtcctgcatcgtcgagatgggatttatcaacgatgcatccgataaccagcttttcgatgaaaagctggatgcgtacgctgccgccatcggtgacgcagtgcttgcaacggcggagacataccgtgccaacaaggttacggatggaaacggtcagggcgcaggcgaagcgggaagcggcaccggagacggtcaaggtacggatggaacgggagacggcgccggagacgatcagggcacggatggaacgggaaatgacaccggagacggacagagggcggaccaaacaggaagcagcaccggagacggtcagagtgctgcaggtggaaatgcggcggtgcagacgattgcgcttgacgggctggataccaccgtgcagagctgggggctgggaagccacaccgatgcggacaaccgcccgaacgatgcagtcagtgcgcagcagaagtatggggattaccatgcgcttttcattggagagaatacaaagaccctctatctgacttttgatgagggatatgaatacgggtacacggaatccattctggatacgcttaaggaaaagggcgtgcatgccgtcttttttgtcacggagccttatgcaaaggcggaaccggcactggtgcagcgcatgattgacgaggggcatgtagtcggcaatcacagtgtgacgcacccgtcggctggcatcccttcgctgacagtggaacagcagcaggaagaggtcatgggaaatcatcagtatatcaaagatacctttggatatgagatgaatctgttccgctatcctgcgggaaagttcagtgagcagtcgctcgccgttgtaaataactgcggatacgagagcgtgttctggagttttgcctatctggattacgatgtggacaaccagccggatcaggcggaaagcctgcagaagatgaaaaataagatgcacccgggagccatctatctgctgcatgcggagtcggcaacaaatgcggcggtgctgggagatctgatcgatgcggcgcagacgcaggggtattcgtttggaacgttgtaatgcgtggcgcgtgaaaaaaaggtttacataatgacggaaaacgagctttggacgggctgtgtgactgattttcgggcgctggatgcggggaggaagaaaagttggggctgggagcctgattttcgtgcgctggacttgggaaggaagaaaagccgggtccgagagcccatttttcgcgcgctagacccgagagcgagagaaagaagtttacataacaccgaaaaacaagccatggtcgggtctggaagaaggaaaacgcaacgttagacccgaaaaagaagaaaagatcacgccgccttggggttgcagaaactgttgtctgtcccagaatttaccgaaaacatcgtgtcaacctcaggatttaccgaaaaagcctgaagttaccgaaaaagcctgaagttacaatattgttcttgatctgatcttgcggtataatgaactctgacgagttcatattgtgcgcagaaagcagcgcaaaaagataatataatagacgcgtacatgatgataggttttctttagaagggaacatgatatggaaaaattacacaagcggaatttgattattgtctggtgctcagtcgttgcacttagccttgtttctttgatgggatacggatttaccgtgcttgcaatccgtggaattgcaattctggtagttgcgggaattatttctacgatcggatgttacctttcgattgacgatgtgaaaaaagtgctgattctcgtattcccgccggcgatcggtacgctgttgtattcgtgggtatatggtggcaattcgattccgtatctggcgaattttgtacttttagcgatgacaacttcctattttatggagtcggttatcatctatttcgcagtgccgtttacggttatttcggtcgtatttatgatcttcagtcctgagaccattgcgggaagcgactattcgatggccggggtggtgacacgcgtatttttgtttatcgtgacagcgatcctgctttattttgcgacgaaacgcggtgcgggtgttgtgaagaaaacggaagagacgctttccatcgttcagaacaatgcgaaagtcgccaatacgatttccacgaatctgaacaccacgattcacaagagtatgagttcagtgcatgcgcttgcggacggcagctccagcgtgaaatcggcggcatcgcagatggggcaggtggttgaggatactgctaatgcaactgtcagcgtgatggataaaattaatgcggcaacaacggagattaaccggaaccatgaactggcagtttctctggatcagggatttcagaaggtgcagagcgcggtagaaaaaggaaacggagcgatacagacggcaaagagttccattctttccatggaggagaccgtcgattccgcgcgcaaatcgaccgattcgctgcttaccgagatgaaccggatcacatcgattctcggagagatcaattccattgcatcccagacgaatctgttgtcgttaaatgcatctattgaggcggcgcgtgcgggagaacacggaagaggatttgcggtggttgcagatgagatccgcgcgctgtcggaggagagtgccaaggcggcgaacaacattcaggagattttgacctggctgacggatacgaccgggcagatctcaaaagaaatcacggcgggcaccgatgctgcttccgcgagtgtggagttggtcggcggattgatggattattttagtaacatcaatgatgcgacggatgaagcgagccagattgtcgatgaagaatataagatcattgaacatgtgaaggaacactttggaaatatccagcaggagatcgagacgctggtggcaacctcagaggaaaattctgcaaccatccagaatatcacggacacaatcacgtcgcagaatgattccatccgcagcatttcggctgaaatcgatgagatttcatcgttatcggcagatctggaacagcattttggggaagataactaagaaaaggtcaagggagacatgcaggggcgcagtctcccttttttacatcacggagaataaggatgaaattgagatttcaaaaagacggtacttttaaaatcatgcagattacagatatgcaggaaattcccgcaatatcgaaagacacgatcgcgctgatggagcgggcggttctggaggagcagccggatcttgtcgtctacactggtgatcagatcaagggctatggtgtgacttacaagggaaaaggagaggagctggagcgggaggtagcacagacgattggaaaattattagagccggtgacaaagcgtggcattccgtttgcagtgacatttggcaatcatgactgccaggttggaatttctaatcaggatcagttctatcatatttacaaaagacttccgaactgcatcggagagcaggcagaagggattgacgggggcggaacctgtgccattcccatcgaggcatccgacggaagcgggagggatgtgtttgaactgtatctgtttgacagcggaacggatgccagggagggcggctacgaggcatttgatccgaagatcattgcgtggtaccgcaagcagcgggaagaccttcgggagaaaaacggaatgtatgtgccgtccatcgtatttcaacatatcccgatgcgcgaatattatgaggtgttaaagcgtgtcgaccgcggggaaaaaggtgcggtgcgtgcctatcggacacataagaacgaatattataagttgggagaaacctgcggtgccggggatatttttctggaaccgccgtcggtgccggatgtcaataccggagaaattgaaccgcaagattacttttaaggcggacgccaatccggcggtcagcatggcactctatgcggtcatggtactgttcacaatctttgcgaacggctggatcggatcggcgatgacgacctgggcaagggaaaacggctggacggggaatttgtgcgacatggtaatcaaggtgatcggaatgctgattccgatgctctggacctatccgtgtaaccggtttctgatccaccggaaaagaaaagattgtgaattgtttcacaaaaaatacaacgaaagatcttgaacgggaacagacttcatgatacgctgaaacagcattgcagtgagatacgttcttgctgtcttgccttaacaaaagtctctgacgccaaaagcagtgcttgcggcggaagatatggcggtcatgaaagtgtctgcatctggtctgcgcgtgcggaacagatgctgtagataggataccggcggaatattccatgccctgtagggcaggttctgccgtgtatttccagcgagtgccgtatctgagaggagatttcagatacggtttttttattttcataggaaataccgtgatacattcatgtgtgaaagtggaaccttcctatgaaataaaaaacgctccgcgaggatgcgcagttcgcggtaaggaaaatatcgctttgcgaaccgctcccgcgcggagaatcccgcaggcaggattctttcttattaggagaaaatatggagacaagaattgcacttatcggtatcattgtggagagcaccgagtccgtggagcagctcaatcatctgctgcacgaatacgggagccatatcatcggcagaatggggatcccttaccgggaaaaaaatgttcacattatcagcgttgccatcgatgcaccgcaggatgtcatcaatgcactgtcggggaagatcggacggcttgcgggaatcacggcaaagaccgtctattccaatgtataagcgtctgcggaatggagatttatatgacacacgaggaaaaaatcatagagcgcctgaagacggagcagaagctgtcggcggaggaactggactgtctgcttacaacagaagatacagaggcagttgagaggcttagggctgaggctagaacggcggcacaggcggtttacggaaaacagatctatatccgcgggctgatcgagttcaccaactactgcaaaaatgactgttattactgcggtatccgcaggggcaatgcatgtgccgagcgctaccggctcacgaaggagcagatcctctcctgctgcgcggcggggtatgagcttggatttcgcacctttgtgctgcagggcggagaagacccctattttacggatgaaaggatctgcgacctggtgtctgcgatcaagcgggcatacccggactgtgcagtgacactctcgatcggggaaaaagaaagagcgagttatcaggcatattttgacgcgggcgcagaccggtatctgctcaggcacgagacggcggatacggtgcactacggaaagctgcacccggaggaaatgtcccttaaaaaccggatgcgctgtctgcgggatctaaaggagatcggatatcagaccggctgcggctttatggtgggctcaccgtatcagaccacggagacgctgtatgaagacctggtgtttattaaggagctcggacccgccatggtgggaatcgggccgttcatcccgcagaaggacacgccgtttggcggggagactgcgggaacgctggagatgaccctgcggctgctttccatcctgcggctgatgaatccgcatgtgctgctcccggcgacgacagcgctcggcacgatccatccgcagggaagggaaatgggaattctctccggtgccaacgtggtgatgccgaatctctcgccggtttctgtgcgggaaaaatataagctttacgacaataagatctgcacgggggatgaggcggcagaatgtcgtttctgcatgcagaggcggatggagaacatcggctatgaagtggttaccgaccgcggggattaccgacctgcggtttaaaataaaaacactgaccgggaagcatgaactaaccggaaagaaaggaaaaattatgtacaagtatgacgcaaaatcattaaaagcagaggaatttatcaacgacgaggagatccgtgagacgcttgcctacgcggatgcgaacaaggacaatgtggagctgatcgacgcgatcatcgcaaaagcgcgagagcgcaagggcttgaaccacagagaggcatcggtgctgctcgcctgtcagatcccggaaaaaatcgaggaagtctatgcgctggcgcagcagatcaagaaagacttttacggcaaccgtattgtgctgtttgcaccgttatatctttccaactactgtgtaaacggctgtgtatactgcccgtatcacctgaaaaacaagcacattgccagaaagaagctgacgcaggaggagatcgtgagggaagtcacggcacttcaggacatgggacacaagcgtctggcaatcgaggccggcgaagatccggtgaacaatccgatcgaatatattctggagtgtattcagacgatctacagcatcaagcacaaaaacggagccatccgccgtgttaacgtcaacattgcggcaacgacggtcgagaactaccgcaagttaaaagaagccggcatcggaacctacatcctgtttcaggagacctaccacaaggagagctatgagaatctgcatccgaccgggccgaagcatgattacgcgtatcacacggaggcaatggatcgtgcgatggaaggcggcatcgatgatgtcggactcggcgtgctgttcggactggagatgtaccgctatgaatttgccggacttctgatgcatgcggagcatctggaagccgtgcacggcgtcggaccgcacacgatcagcgtgccgcgtgtcaaacatgccgatgacattgatccgactgcttttgacaacggtatcagcgatgatatttttgcaaagatctgtgcgctcatccgcatctcggtgccgtatacgggaatgatcatctccacacgcgagagtcaggcagtgcgtgagaaagtgctcccgctcggcgtatcgcagatcagcggtgcatcgagaacgagtgtcggcggttatgccgagccggagccggaggaggagaattccgagcagtttgacgtcagcgatcagcgtaccttagatgaggtcgtgaactggctgatgaaaatgggctatattccgagcttctgcaccgcatgttaccgcgagggtagaaccggtgaccgttttatggcgctctgcaaaaatatgcagatcttaaactgctgtcatccgaacgcgctcatgaccttaaaagaatacctcgaggattatgcgggcgaggagacgaaaaagatcggtatggaactgattgaccgtgagcttgagaagattccgaatccgaaggtaaagcagaccgcctacgagcacattcatgatattgcagagggaaagagagacttccgcttctgatagccggaagcgatgctgggatcgggcagccgctggaagccggatatggatgtaatacggacaaggggaaattcgtatgcaggaaggaaaaagaaagttatggcagtgacattgaatgagacgccgggcagcagccgtctgcacataggaatatttggaaaaacaaacagcgggaaatccgcactcatcaacgcttttaccagacaggaggtatccattgtcgccaatgtggcgggaacgacgaccgacccggtctacaaggcgatggaggtacatccgctcggcccgtgcattatcatagatacagcaggatttggtgacgagagcgaactgggcaaaagccgcatggaaaagacacgtctcgcagcggaaaagacggatattgcgctgctccttgtggcggggaatggtgacgcggcgcttgatgaggaagaaatgcactggtaccgctttttgaaagagcacgggacgccggtacttttcgtcgtggggaaaacggacatccggtcggacgcacaggtggataaactggcagtcgccatccgggggaagaccggtgaggaggcatatccggtcagcgccaagacgggagagggcatggaggcattaaaagaagcactgatccgtaaactgccggagaattacggcagccgcctcatcaccgggacactggtcgaccgggaggatctggtgcttctcgtgatgccgcaggacatccaggcacccaagggaaggctgattctgccgcaggtgcagactttgcgcgaacttctcgataagaaatgcctggttatgagtgtgacgaccgatcagctgataccggcgcttgcggtattgaaaaaagcaccgaagcttatcattacggattcccaggtatttggctatgtctatgaaaacaaaccggcggagagcatgcttacgtccttttccgtgctgtttgcagcgtataagggagatctgccgtactatgtggagggtgcgaggcatatcgacgcgctgaacgcccattccagggtactgatcgcggagtgctgtacccatgcgccgctgaaggaggacatcggaagagaaaagattccgcggatgttgagaaaacgcttcggcgattcgcttgcggtggatattgtgagcgggacggacttcccggaagatctctccggctacgatctcatcatccagtgcggcgcgtgcatgtttaaccgcaaatatgtgatgtcgcggatcgagcgcgccagagggcagggcgttccgatgacgaactatggcgtgacgatcgcgcatctgacggggattctcgataagatttccatgccggaggcataggcaatgttactctttttggtggaaaaaaatgaggcggctctgtataataggagaggagaaataacagggaagggatacggaggaacactatgagatacacgacaacggatgaactggaacatttttcttttgcagaagcctacattgctgacgtgcagctggcaggcggatttttccatatgacactttcaaacgtgacgatattgccggagaattcctgcaaccgggatatccgcgagatgcgcgcgaacgatctggtgttaaagatcaaggagccggtgatccggtccctggtgcgggaggggtacaaggtctacgacgccaacggcgcgctgctgcggacctgcgaggatgaggtgatcgatcaggcggcgtggaacgagacgatccgttcctttgcggacggcacgctctatgcgttaaagcaggacggggagaactatatatttgagatcgatgcgcccgatgaggaggagtatgtgcttgcggtgtccggcacacacaatacggcatcctgggaccgtttcttgaataagtaagtgccgggaagaaaaaggcgtcagagaggcaaacaggcgcagatgatgcggcagggatcggctattatctgcggcggcagcttttgcagttgcgaaccgcaggaagaaatgctatagttttagatagaaaaacaaaccccacacaggggaaaggagataccaatgtctaggattataacgattggacgagaatttggcagcggcggacgtgagatcggaaagagattgtccgatgagctgggaattgcttattacgataatgagatcatcagtcagattgcagaccgtacgaagctggcggagggctatgtgcagcatgtgatggagaacggtccgtcgacgttgtatccgattacgatcgggagaagcttttacatgggagttgatccaatcatggagcagaataatgcgatctaccgtgagcagagccgcctgattcaggaatttgcggagaagtccgactgtgtcatcgtcggaagaagcgccgattatattttgcgcgagaagcatccgttccgcctgtttgtctatgcggagatggagcacaagatggaacgctgcaagaagcgcgcgccggagagcgagcactttacggacaaggaattaaagcgccatattttagacgtggataagcgcagggcgcgttactatcagttctttaccggacagacctggggagaccgtctcaactatgatctgtgtatcaatacttccaactatgacatcaaggagctggtacatgcaatcgcacatctggtagaagcatagaacaatcgaatgcatgggaaaaacagattccccatatactttacagatatttgtgatgcagggtatatggggaatttttatggcattattgcagcatgcggtggcggtggcgcgggaatatctgtggggatttcccatgcttgcgctcttattcggaacacatctgtatttcacatttcacctgggcttcatccagaaaaaaatcccgttgggaatccggttgtcactgatcggaacgaagaatcaggaaaaggatcaggtaacaccgtattcggcgctggcgacggcgcttgcagcgacgatcggtacgggtaacattgtgggaatttccacagccattgccatcggcggaccgggagcggtattctggtgctggctgaccggggtattcgggatagcgacctgctatgcggaatgttatctctccataagataccgggtgcgcagggcagacaatacgtttgccggcggaccgatgtatattttggatcggcgtctgaaaaaaagaaaactggcagcggcgtttgctgtatgtacgctgctggcatcgtttggtatcggaagcagcgtacagtcatactccatacgcacggcgctccagcatcagattaccgtgtcgccgcatctggtcggaatggcggtcggggtgcttgcagggattattatcatcgggggaaacagccagattgcaaaggtgtgtatgtggctcgtcccgctgatgagcgctttttatgtgggcggctgtctctatattataggaagaaacagggcggtgctgccggagacgttagcgctgattttctcatccgccgtctgcccgaaggctgtggcgggcggctgcaccggcggagcgctgcttcttggcatccagacaggagtctcccggggattgtttaccaatgaagcagggcttggatcgattccgatggtcgcggcgacggcagcatcctcctctgacagcccgaaggaggcggctgtgcggcaggcgttaatctccatgacaggaccgttctgggacacggtggtattatgtgcgatcacgggaattgcggcggtcggcagcatggtaagccatccgcaggaataccggggagtggcaccggaaaatatgtgttttgtggcattccgggaattgcccgtcggcggtgagtggatgctctcgatctctctgacgctgttcgcgtttgccacgatcatcggctggaacgtgtacggaacctgcgcggtgcgctacctgtggggcgaggcgggggtgcgtgtctaccaggtggcgtacatgtttttcgcttatctgggagcggtgctttccatggagcttgtgtgggggatatcggatctgctgaattccctgatggctctgccgaatctgctctgtctgtggatgctgcgaggcgaaattgccacagactgtggaaaagggacagataaaacatcaaaaaagaaataaaaattgaaaaaatattattcatgccggataaagtatgatatattgaaatggtatgtggagttatcgaaagaagaaaggtgaaagttatggagaaaaaggaacagaagcatttgtatgcagatactgtggaacagaataaacgtgtcaatcatttccttgctatcggatatatcgtgttttatctctgtgtgctttgtgtggtaggaattgcctgcctcagaggaatccgcacagttggatataccgttatgatcgcggtattgattattctggcaacagcgggaacactcgtgttgtaccagcggagaaaagatgatccgaagatccgctatattgcgacggtcgggctgcttgtcattacgtttgtgatgggatgggcgtttgacaattattatgtgcgttttatggctgcaattccgctggttgcatgtattctgttttacgataaaaagttcgccgccttttccgggattgctgtatcggcggtgaatcttcttgtgacggcgtcaaagacgctggcgcttcacacataccagggcgagaatgcactggatcagtggtgtgcgacgctggcaattatacttatgatggtagtggtttatctgacagtatccgtggcgtaccagttcaaccgcgatacgattggcagcctgacagaaaaggaagcagcacagcgccagatggtggacgatatcattgcggttgcagatcaggtgcgcaagggaacagagaatgcgatgaatattgtcaatgaactgaatagttccaccgaggtagtcaacggtgccatgaaggatatttcggacagtacacagagtaccgccgagaatatccagacgcagacggagatgacacagaatattcaggactccatcggaacgacgctggagcgttcagagaagatggtacaggtggcgaagcagtccggagagctgaatgagaagagttccagaatcatggatgatctgaagaagcagtccgcagttattgcacagacaaactccgaggtggcttcctccatgagagaactccaggatcgtacaagcgctgtcaaaagtattgcagataccattttttctatttccagtcagaccaaccttctggcactcaatgcatcgatcgagagtgcgagagcaggcgaggcgggaagaggctttgcggtggttgcagacgagatccgccagctggcggagaagaccagacaggagacggagaatattgccaacattttagagcagctttctgaaaatgcccagacggcggcggatgcggtggagcgttccgtgacggcggcgggtgcgcaggatgagatgattgcgcaggcatccgagagctttggcgccatgaaccagaatgtcaatgagcttgtgacggacatcggtgagatcgacactatgttaaacaacctctccaaggcgaacaatcagatcgtggagaacatcatgcagctctccgcaacgacggaggaagttacagcttcttctgtgcaggcggcggatctcagtgttaagaatctcggcaatgcggaaaataccaaggatctgcttcacagtgtgttagacgagtcgcacaagctggagcagtatatccactaattggacagattttgacctgtagtgaataaaatagaaaaataacagaaaaatgaggtataaaggatgtatttagtgcagtttatcagaggattttgcatggcactggcagacagtgtacctggcgtatccggcggaaccgtcgctttcctgttgggtttttatgaccagtttattgattctatcgatgatctgataaccggaagcagggagaaaaagaaagcagctctgttcttcctgattaagcttggaaccggctgggtctgtggaatgattctcgccattctgattcttgcgagcgtgtttgacgctcatatctatgcgatcagttccctgtttatcggatttattatttttgccattccgattatctttagggaagaaaagaactgccttgcggcaaaaaaatctgccattccgtttgtgctgattggcgttgcaatcgtgaccgcgattacttactttaatccgagcagcggcggagagggtgtcagcctggagcatctgacgccggggcttgccctgtttgtattccttgccggaatgattgccatctgtgcgatggtgctgccgggaatttcgggatcgacgcttcttttaatcatgggactgtatctgccggtggtgactgccatcaaagatattcttcatctgaattttgctgcatttccgacggtgtttattttcggatgcggcgttctcgtcggtatttttggtgtggtaaagctgatccgcaaggcgttagatcatttccgggcacagacgatctatctgatcatcggtctgatgttaggatcaatctacgcggttgtcatgggaccgaccacgttggaggtaccgcagccggcaatgacgcttcatgattttaacatcctgtttttcgtgatcggcggtgcgctgattatcggacttcagaaaatgaaagatttaaaagcataggacacgaaggagtatcatgaaaaagttattgcagtatttgggaaactataaaaaagaaagtattttaggaccgctttttaagctcctggaagcttcatttgaattgattgtcccgcttgtcatggcggcaatcatcgataccggggtggcaaatgccgatcgtccatatattatgaagatgagtctggtactgtttctcctagcgctgatcggattgacctgtgccatcacggcgcagtattttgcggcgaaagcggcggttggctgtgcgacaggattaagacatgctctgtttgaacatattgagacgctgtcatttaccgagatggataccgtcggaacgtcgacgttaattacaagaatgacaagtgatgttaatcaggtgcagaacggggtgaacctcgttctgcgcctgttcttgcgttcgccgtttatcgtgtttggagcgatggtcatggcattcacgattgatgtgaaagcggcgctcgtgttcgttgtgaccattccgctgctgtcggtggttgtgtttggcatcatgctggtcagtattccgctgtacaaaaaagtacaggcggcactcgataaagtgctgggcatcacaagagagaacctgaccggaagcagagtcatccgtgcattcaacaaggagcaggatgagattgcacagttccacgaagacaatgaggcgctgacaaagatccagctctatgtcggcaagatctcggcgctcatgaatccgcttacctatattatcatcaacggagcgatcgtcgttctggtatgggtaggagcgatccgcgtggacaatggcaacattacgcagggacaggttgtggcgctggtgagctacatgtcccagatcttagtggagttaatcaagctggccaacctgattatcaacatcaacaaatccattgcctgcatgaaccgtatcgagactgtgcttgacatggaatcgtcgatcacggagcatccagtagcggagacgggaagtctcacttcggatggagcaggcagggaaggaaaagagacaatcccggcggagaatgccgtcgtattttccaaggttggtcttacttatgcgggcgcatcggaggaagcgctctccgacattgattttacggtcagacgcggagagaccatcggtattatcggaggaaccggttctggaaaatcttcggtcgtgaatctgattccgcggttttacgatgcgaccagaggagaggttctcgtcgacgggaagaatgtgcgggattatacattggaggaactcagggcgaaggtcggtgttgttctgcagaaggcggttctctttaagggaaccatccgtgagaacttaagctggggcaattcggacgccacggacgaggagatgtatgaggcgcttgagactgcacaggcaagggagtttgtggatgccaaggaaggcggactttcctatgagatcgagcagggcggcagaaacctttctggcggacagagacagcgccttacgattgcgcgtgcgctcgtgaagaagccgcagattctcattatggacgacagcgcatccgcgcttgatttcgcgacggacgcggcgcttcggaaagccatcgcacatatggacgggcagatgacggtatttatcgtatcgcagcgtgcggcgtccatcatgcaggcggacaagatcgtagtgctggacgatggagagattgtaggacttggaacacacgaggatctgcttaaggactgcgaggtataccgcgagatttacgagtcgcagtttaagcggacagaagaacagcaggcgggagaggcgaaaagatgaaaaaagtggtaaatgaaaatcaaaaatcaacgctgcgcaaggttctgcgatacatcagacgatactggggatacctgggagcatcgatcattctcgcggcggtgacggtggcgcttaccctgtatcttccgattctgatcggtcaggcggtcgaccggatcgtgggaaagggagccgttgactttgccgggatctttgtgattctcagaaagatggcggtcatcatcggactgacggcagtggcacagtgggtgatgaatgcctgcaacaataaaattacctacaatgtgatccgggatatccggacggaggcgttcgagaagattgaaaagcttcctctgaaatatctggacgctcattcctacggagagattgtgagccgtgtgatcgcggatgtcgatcagttcgcggatggacttctgatgggatttacccagttctttaccggtatcgtgaccatcttcggaacactgattttcatgctgacgatcagtgtgcggatcacggtggcggtcgtggtcatcacgccggtctccctgtttgtggcaagcttcattgcgaaaaagacattttccatgttcaagctgcagtcggagacaagaggagagcagaccgcgtttatagaggagatggtcggcaaccagaaagtggtgcaggcattttcccatgaagatgaggcactcgagaagtttgatgagatcaatgagagactgcagaagtattctctgcgggcgatcttcttttcgagcattaccaacccgtcgacgcgttttgtcaacagccttgtctacgcgacggtaggcgttgtcggagcttttacggcgatcgccggaggaatcagtgtcggacagctgtcgagtcttctgtcctacgcgaaccagtatacgaagccgttcaacgagatttcgggcgtcatcacggagcttcagaacgcgcttgcgtgtgcgggcagagtgattgaactgatcgaggaggatgccgaggtgccggatgccgaggacgcggtagacttagagcatgcaaacggtaaggtcgagctttcccacgtctatttttcctatgtgccggagcagaagctgattgaggactttaatctgtcggtgaagccgggacagcgcgtggcgatcgtgggaccgaccggatgcggcaagacgacgctgatcaatctgctgatgcgtttttatgatgtgaacagcggcacgatcaaagtcagcgatattccgctgcagcagctgacacgcaagagcctcagggacaactacggtatggtgctgcaggagacctggcttcggagcggaagcatccgggacaacattgcgatgggaaaaccggacgccacggacgaggagatcattgcggccgcaaaggcatcccatgcacacggctttatcaagcgtctgccggagggatatgacaccgtgatcgcagaggatggcggcaacctgtcacagggacagaagcagctgttatgcattgcaagagtcatgctgtgcctgcctccgatgctgattcttgatgaggcgacatcctcgattgatacgcgtactgagatcaagattcagaatgcgtttgcaaagatgatgcagggacgcaccagttttatcgtggcacaccgtctctcgacgatccgcgaggcggacatcattctggtcatgaaggatggaagcatcattgagcagggaaatcacgaggaacttctggaaaagaacggattctatgcgaagctgtataacagccagtttgcaaagacgtcatagattagtttgacgtgctaagtaataggataagaggcatatccaaccgatttcaggcggaaatgcagatggaacattcgttgaaaaaaatgcgtgcatttcttccgaccggatttttgcatcggattccgtgtctcttctacgttttgacaatccacggaatgtgtccgacaaaccgcagacaatgagcggactttctggtgtccctaagggcacctcttcacagacaatataaaaccgcgcgaagccgctgtctgagtcggcatctgctattgaaaacagggcagatgccgactcagactagccgcatggttcgactactttaaccaactttaaaaagcaaaagaggaagatatcttcacggtatcttcctctttccatcttctgggtctgttgcgacgtcgcaatgacctctttcttcactttcattatcttgccctgttcggagcaagatacaattcatacaattgctgcaatgcccccgcttcccgactgttcccgaatccatgcgcatctacatactcattgatcgcctggcgcgtctcataattgatccggtaagtagcaatcggcgtagtatgtattataagcagataacggtttatgtggtggatacggcggcggtagatgtgaaaccagacgggacgacgcgttttattagcgaaaaatattatgaaaagtcttatgagcagggaggttttgaagataattcggtttggaaaactgatcctgaatatgtggcggcgcttcggacggcgtttgataatctgaaaaatgatacgccgattgctacttaccggatcaattatgagacgcgccaggcgatcaatgagtatgtagatgcgcatggattcgggaactttatctttcatgctgattgcctcctttttcggtatgtatgaattatagcatgtacctcacataattgcaatatgcaatttaatgattatttttaaaatttcataacgcttgacaacgcaatataaaaccgctatactaacagcacaacaaaaattgcataatgcaatttggcgggaggtgacaagatgacggaaagaaagattgcattatccatcgaggaagcagccgactatacaggaattggcagaaacactttgagaaagctggttgaatggaagaagcttccggtattaaaggtcggaagaaaagtccttattaaaactgacattctggaaaagttcatggaagccaacgaggggcgtgatctgagggataaaggaaatgtaaaagctgtcacaagaaatgtggcaacttaaaaaggcggcttcctaagaaaccgccaaaggttctatcagaccgaagccatgatatacctacacgcaagaggattataccatgtgcttctcctgatatgcaaccgggaactgttgtttatcggaaaaagaaaggatgaagacgatatggcgaaatcaacaaagacttatgaagaaagaatacgtgcattagagaaaaaggaacaggaaagcattgaagctacaaaaaagctcatagcacagcggaaggaactggaaaagcgaaagaaagcagaggaaagtaaaaaacgaacccataggctctgtcagattggtggcgcagtggaatcggttcttggctgtccgattgaggaggaagatttaccaaagttgataggcttcttaaaaaggcaggaaacaaatgtgtgcgtaatatggtcgtttgatgatatgggactaggagaacaggttattttatccgataaagaaagcaaaggaggttactatgagtaatacaattaatgtgaactatatgacacgggcttacaatcagtaccagcagaaaaatgcggctaaagatcaggagaaggaagatacaaggtttgcggatagtgtaagagaaaagagcgaagctagtggaagtatagtgggcaattcaaaaataggttctgtgtctgctaaagatatgacgatggtggaatacaagcagtacatttacaataaaatatctcaaattccaatgcaccccacaagagcaggcgagtcaatatctgttacaatttcagaggcgggttttgaagcaatgaagaatgatccagagtatgaagcatgggtattaaatgatttgcaagtgggttggtcacaaccagataaatggtccggtatatgcggaggagcgttttctacaatatattatggagcatcaaaagaagaatgtcatgctgagatgtggagtgctggttataacaatgggaatggtgggaagatttttaatgataagtcaaaaaatagtttttgggagcgcagaatagaaaataaaaagagaatagaaaatcaggtaaagaaacaacaggaaaaaaagcggattcagaaaaaacaagcggaaagaacagcttatgaagaatatgcgcaaaataaaaggttatccgctcaggatgccagaactcgattggtggctgagagtagttcgtctgccaagactgtcacaataagtcaggcagtagcttcttatgagacaaattttacaatggcagtaagcgtatcgaacaaaacccaatagcctgcaaataaaaaatcaaggctaaatagaaaggagagatgcagtatgggaattaatggagtatcatcgtatgccaatacatacacatacggaaatgtaaaaaatgaaaatgtaaagccatcaaagaatagtgaaaagaattattatgcaggatacactatgaattcagccaataagtttaaaaatgtatcagactattcaaagtatttgactaacaagtataaatgtttgactccatgcaaaaatgcttctgtattgattgacagaagtgtaatgcaaaaggcatgtggagatgaaaaaactgcgaaatggcttgaggaaaatttagcaattatgccagatgttatacgaaatgcacagaaggcggcaataagtcatggtagtaaactgatatcagtggagtttaagtttacgaataatggaaccgaaatgacaacctgtggcatttttggagagactggtacggattcagaaattgacaaatggctggagagaatgaaagaggataaagaaaaagaagataaaaaaacagaaaatatgattgctatagaagcgacaactaaaaataaggtaggttttgatacatatgcatagtatcaatttctataattttgaagaaagaaaagattacaaacaaggtattgaaggtagtggagagaattgcccggaatgaagtggaaaaaacagttcttggcaggacggcagagtgttcagcgatttatcaccagccgaaaagaccgaagaaaagggaaaactaggtcagaataatgaaatattttgtggagtgttgcggttgtgattatcgtaatggcaaaacaaaaggagttaatatgggattaggcgttgaaaattcagttaaatccgggcgggaatctgacctatcagtattacgcaagtgatatccgggaaattttagcatataaccggacacagcacaaagatattatgtctgagttgaatgtacagtttgttatagcagacggtacaattcagataaactgattggaggaatagaagtatgcacattggttttggtcagaataccgtatcttcattgtacggtcatcaaaaaggcgatcatatgaaaactatagagctttctcataaaaagcataaggcaaatgaatcgcaagaaaaaatgaccgtaacatccggcaaggacgtatgccggaggatagggcattcagatgaagccgatggggaaaatcaggaaaacgcatatatacatgataggtttgccttagacgctggttacgcaaattatattagagaaacagtgcctaaaactacttggtcaaaggattatcttcaagaattatgggatgaagagactaaatatttaaagagtatccgtgaaagtaaaaatggatatggtttcgatgatattggaatgggagctgcatatgcctattctactatgtatcaaaaaattgtagaaggatataggaatggaacaagagaagtgtatgtatgcgataatccagagagtggaaaaagacgtctgttgtcaatggatgaagaattggaaaagctaaataaaggttttgaggaactgataaaatgggataaaatggttgccaaaagtcaaaagcaaaatgcagaaaataagcagaaatttcagaatacaaaattggatgaatcgtttgatgcctttgatataaatcaggcatgtgactatattcaagattcttatttagagttccgttcactttatctggagcaatatgaaagaacgggaggaaatatagatataaagtctttgttttcttatgttttaagaagcggaaatcaggatatgcataaatattgtgaatttctgtttgaaaaaattggttttattgtttaatgcgggcattaaaatgtttgagaaatattgaaataataaggaaaaagcatgagatggcggttgcaaagcaacagagtgaagcgtggagaaaagcgttagatggagtgccggatagtttaagaatgttgttggaaataaataatactgaaaatgtgccggaatattcagaaaaacaaaaaaagcaatataacgatgcaatcaaggcttatgatcataccggtaacggtgtaagctggtcgcagtttgaatggaaaacttacgatacacagatgacagtcacatttgaggattcggtgaaagttgaaagcatttcaaaaaatggaaagtttaagtgtattatggagccatatccaggtaatgaattagatttttaaaaagtatttcatgtaggagtcagagcatattactgactcctatgcagaaaggagaacaattttatgagtataacgaaagttggaagttcctataatttcatttataacacaaagacaggtaaattatctacaaaagatggcagcaaaaatgaatttgttgatttttgcaatggagatgtaaagggagaagatacagagacactgaatcattttgatgagcatacaagatatcagtttacaagaatgctgtttgcatatggaaccggaatgaccggacagaatccttttgccaatgatgagaaagtcgagattacagcggatatagacagtgcaacccatacttccttttatgtgaatgggcagaaagcgtttacggcaattacgggtatgtcatatctcccatccgagattcaaacctttggaaccgtacagcagccatttaaaaccagagggtacaaaccatatgatcccagtacaaacagtatcacgattggggttggaagcagatttaatcttggaaatggatacagcatgacggtacaggaagattttgtctggggcgagggctatggaaacggaagcaaggcagatgatgaaagatgcaatatgatgataggtggtctgagctccctgatacattttgcggatcagcagtatttttcaagtatgacagatacatacaccgattatattttagattttcttgcgtcacagggagtggatacaagcagagaatttgtgataaacgggacacattgcgaactggtaaatgggaaaatacgtgaagttggtaacgattatgtggtgcctagttccattcagcagaaagcagtgaaaagatatgaagaaagtatgtcacagcttttgaatagcggaacttggtatagatggtcataaaagtaatagatcacttggaccgttatggagagtgaatagattccgaatgacagaggaaaggacagcatatctgcaacaggaaaaagaattttatacagtgttggcatccaaaataggagaataattttatgcatgatgcaaaaatgatattgagataggaggagttccatatgaaattagggaagaaaacaaagactgaaaaaggaacatttatggcatatgcttcttgttcatgtacttgcttctgcgtatgtaagtgccagaactgtaatagatcattggggagaagaaaatagaaatggaaataaacaatactggttctacatatggggcggcatttcgtcaaaaaccgatttttttcatgtctggaaaggaaacagtggcattttttgaagggaaactgaagaaaaatatgacacttcaggaagattcctgtacacttggcagcaatgacacttatcgcagacagcataccacttatgaggtttcggacaagaagaagggaagtacgtttctggatctggattttctgattaaggacgaaaccagcagtctgaaaggaaatctcagtgataaaaaggatgtggatttctacaacttttccattccatttaatcgaaccatacagaattattttggggttcaaatatacatggacatgccggaaggctgtgattatgacctcaccttatatgatgaatatggcaatcaggtcggaaaggcagaatgggacggggaaggacgtaaaacactgaccatcccgaactgggatacaaataccaataaatattgtatcaaaatagaaaacaaaaatggggaagaagtttctccgcatgattattataaaatcagtttcaaggttacggaaaataaagaacaggaaaagaccgatgccataagggaggcattcgggaaccttcacggtgcatacagcaggaaagatgaaaattggagggaatacctcgacaaatataatgaagtcctgatggatacagagaaaaattatacaaaagaaatggagaaactccaccagaagcagtttgaaagtctgccggaagaaaaacaatacaaaggcgggcgcacagtggatgaattgttgcaggacatggcagaaggaaagacactggatgatgcggaaacggagtatgtgaagatttttgcaaacctgaaagattttgagaaagcacagcagaaggcggaactgaaaaatgatttttccgaggattttgtaaaggatctggaaagcaaaggtatctcccgtgatgagctggagggaatgcagataaagattgaaagcaatgggaatgtaacagtgagcggtatcgaagataaggaagtccgggaacaggttcagaaactggtagaggaaaagtacagtgaccggatgtatcagtattacacaggaattgctgacagtgtgggaaatctgtcgtccaatacctaccagtatgccacggatgtgcaggaagtcaggcgttacttaaaaggggttacgggagaagatatttctctggagaacctttacctgacaccagacggaaagattggcgggctgccggaaaaagctgctaatctgattaacaaaacaaaggacaatgccaagatagagcggataaaggatgcattgataaatatcataggacataaccggataagtggtgatctggggattcctgattttacttcggagtttcaattcagcaatggagcgttctctgtggcagacagtggttttacggtggatatggcggcattggatagaaggctgacgccccaaccgcatgataacatgtattcggatatgtatgagtacagtttcagaaaagtattatgattatgaaaagtaattatacacaaggagaatgaacagatggtaataacccgcacagtagagatgcatgcgcagcttgtgggatatgattttaagaaaaaaggtttacccactgataaaaatattgcagtagaaaatagtaaagtttccaatgattatttctggaaaacaaataaatatacggatcaggatgtgtttggaagaacactggatctgacggcacttatcaataagccggacggatatttaaagggaagtttatcggatacggaggatgtggactattacgaattcaatattacagagtaccgggcattaagttttgtgaaggatacctataatagggatattactatcactttagatcatataccggaaggctatgattatgagatggttttgtatgatgaggaaggcaatcaggtcggcattgggaaagagaatggaaatggcggtcttagtattaccataccgaactggaattcggacaacacgggttataccgtaaaggtacaggcaaagaatggttcgacggtaaacccggatgccgaatatcatctttctttccagacaacgcaggcggataaaagccatggagcttatcaggaaatggcagaggttcagaaatatgcagggacagtccggaagcagatgcaggaaggcttaatcgatacggaggagatgcgtgcaattaaggaaatccggcagaagtacaaaacttattatacagagcagatggagaaactgcatcaggaacaggcagaagctgtcatgcagggtggggcagtgccggatgatgagcagattcacaatttactggaaaagaaggcggcaggcaaagaactgacggagcaggaaaatgcccttttaaatatcttttgtaccgcaacagagctggatagtgcgaatgcaagtgcaaaaatgaataccacagtaaaagacaggatatctgttgatttgcaagaagcgggaatggatatttcagattccacgttttccataaaaattggggcggatggtcaggtaagtgtcgatggcattaatgataatgcaatgaaacagaagatagaggatgttttgtcaaagtattcggatgatctgatggatatttatttttctatggattcggaaatacaggcattgtccgataaagaaaagtatctgttacaagctgcggtggatgtggaaaaatttttatataaggcaactggcggcagtgtatcgcttggagacctttccgtggaaaatgcaacgatacatggtctgccgaaaacactggatgacctgttaaataatccgggcgataacctgacctatcaggattatgcaagcgatatccgggaaattttagcatataaccggacacaacacaaagatattatgtctgagttaaatgtacagtttgttatagcagacggtacatttcagataaaagattaaagtttataatggagtattcaataaaacccaagtgattgggagggagaatcatgagaatagagaatggttacttacaacaaagtatgttatgcagtaaaaataatagaaatgcagtaggaaatttttctgatacaatgaataaagcccaagagtgtataagtaataagattagcacaagggattcctatgtaaacagtacagattatagtaactttggaatttatacacaaaatagtatctctcaagatattgaattaccaatagagacagaaagatataaaattgaagatgctacatatgtgaatggagtagcagcatatgagattgtagataagcagacaggaaaagatttttatataagagaagatcaattagcaattcaaagagatgagaaaacaggaatggagttcctgattaatatggatcagccattttcgtataatgtaaccatgacaagtgaactgaaaaatcttttgaatgatttgtctgacaaaagaaatattgatataaaggagataccgctacaggggggattggtagtaaaacgtgatccaaagacagggttaaattatttgtcgataaagggaaatgaggcacaaggagtttcggtaatcataacatccgataaagatatagagacgctgaataaattagctgatgaatttcaaaaatatccggtaagttcacagcggtttacggcaggattatatgctttacttgagatatcaggaaatctgaaacgcgaaaaagatggttttacatttttgactcctaatggagttacatatattccgtatgatggtgattccagcaaagcatgggaaattgatatgccgggttcctgttatgctactgccagaaaatgtttggcggcagaaaatgattgtgcagacataagtgcatggacaaaaaatttgaaaggaataaagatatattatggcgataattatggcaccactcaggaaaataatgtatataaagttgatgatttaggcagatattatatgtttgcataagatatatatacaagtatgaaactataaaaatatagtatgttttatgtggtaaaaatattgtatttatgagacttttggtatttcacaaatacctaagaaaaaataaagtagaggagagtgtatattatgaatattgattacagtcagttttacagaggaacaacgaatattccctcatatgggaatggtatatataagaaagacacccttgtaaagtatgaatttaacactacagatgaacatggcaataagattatggacaagatgtcaagggaagaaaccctgcaggcgatgaaggacatcggttcgcagtatggagatgcggttattgttgaattttcgggagatggaatggctgcacttgtggaaaacaagaaaggtatagtggatgccaatgtaacacaggagcagcgggaatcaatggaggcgagaaatgcagcgttccaaaaagaaattacgcaggttgataactcactagaacttccggcatattccggaatgtatggtgcagacaaggcggttgcatctgcggtggagaactgcagcaaagaggaacagggatttgtgtatgatatcatccgtcagaatttccttgttggaaatactggctctatgacagaggaagaacggcaggcaaatatttcacttggtatgaaaaaagcggaatatgcggcagagaattttatcccggaagatagcagaaaaccatttttggaagcaatggagtctatcgcaaagcttgcgagcgcaggaaaagctgacaataacggaaatatggactatggagtagggaaaggtacatatcttggacatggtagcaatcttgtaaagactacaaatgcgcttgatatgatgaggacgatggacggcagtgcatacacggaatatcagaagattagtaaagaaagtagcaatgaggacagacagcttaatgcattaaaataccttacaaattggtatgaaggggcagtgaaaaagaatccttcgatggttgataattacgaaaagcagtcggaggaatatgtggagaaaaatgtaaaagatcagaagctggatgcaactttttcagatataaagacagagaataaagcggctttttttgaaagtctgaaagtgttccagaataataatcctaattttctctcatctatcataaatcgggagctggcatctaaattttggagcatttgataaacgtagattggaaaagttataattgctcggaaaatggaagataacaacaataaagtgtagagtgtgcctttcacatagggacacttgttacaagcaatattgtaaatgatacaagtggagattaaggcacaaatatgataaaaacaaaaaatatttcagaaatgttgacttctttaattgaggagtatcgttttaataaaaatactctttcaaaatatttagaaataactgaagaaacagtagattgagtagtaatgggcaatgtggaatgtttgccagatgatcctgcattgcgtcttaaaatacttagtaaagcaggatttctgtattttggagcgattgaagataaggataggcaattaagcggttttttggaagtgcttgtttcctatcatggcatatccaagctaacgatagcaaaaatggctggtgttgaggaaaatgatattgacaggcttttagccaatccaccagaaaaagatgaaatcgaagtaaaatataaaattgctgtgactgttatggaattgcgattttggctaaaagattgtgaatcaccgatataatcgggatttgtgagtagagggcacttatgaaaaataaaagtatcaatcaagtttccataataaatggtgaagatggtcccacaagtgtttttatatttggagaagctcaaaagcaatctctaaagattagaatccgaaatgctatctatcaatccagacgaaaaaggatagaaaagagaatagcggtcaacccgcatacccttgcggaagtggtgcaatacgcaaaggatcattatgatttagtggaaatcaatcctgccgcaacaaattggatagaacgacagaaaaatctaaaagctagtttgattatgcagcataaaccagaacttttgggccaaaggaaggatattccaaaaccagattttcataatgaagaatctgttaaaaattttttgaatgaaatggaaattagaaataaattgattgaccaaatgcctgataatgtaattcccatggattttcatttatatgaaataaaaattggtgaggatttaatggaaatagaggtagattatacctggaatatatttggaatatcttactctggaaataagtcggtcataaaaaggtttaagaaaatagccagagatttatattgttattatggtgtcagtgaggaggatataaagaaccggacaaaaagatattcttcactggtaacggaattgagttcataattcagaattttaaatagaggtgtatagtagggttagttcaggaagtgattcgttttatttatatgtagaagatggcaatggaaatgttaattatacaacagtaagtaagagtggaacaataacaattaatgattttaatggttttgatccgtcaggcaagtggaaaatatggattgttacaaaaggaacagtttcaacatccactgaaacaataaaagtatattatacatattaaaaatgtaatgtggctacaattttgtattataggagagagtgaaatatgaatgtaaatattaacaataaaaatttattttcgcaaagtttgctaataaacaaattcttctttcagaaaaattcttcacacaagcagactgggattacgaccgtagattctgggtgtcaatatagaaataacaattattactataataaagatggtgtaccttttttatcaaaggaacaggcagaccgttgtatcaatggtaaggattggaaaaagatagtgtctgtatcggataaggtgaagtcggatttagaaaaggttgtaaagcaggattttatcagtagcaatggtgcatatataccagaagaaagcaagagacatgatgtaatcaaacagtatttgaatacgattccttctgaacagcgaaattccgcttcgtggacattgagcagaatggctggagattatgcttcaagaatggagacactggtaaagaaaaataatcctggatggaagccgggagatgcatttgatacaagtattttagatcagatggatgatactcttggtggattagattttaaagtatagatgtaggtgagaaaaatccaacaggtggcatagttggaaggactccgaataatgaaaggagatatgttaatatggcagttacaggaataggaacttatgcgtcatatacgaatcgttatggcaatacacaaaatgctggaaacaaaacgggcaggacatataagaatgcccatgaatataagaactatttaacacaaaaatacgattgtttacgaagcagggattattccgtaaatataaacagttctcttttgtcagaggctatgggagatgaaaagacaaaacaatggttggagtataatctatctttaataccggaaagtatcgaaaaattgaaagctgctcaaagtgctcgtggctgtaaggtactgagtgtaacggatacaataaatggatatgatagcataacagaagaagtactggtaacagatgaggttgatccgggaacagaaaaagcaaggaaagaacttgaagaaagactcgagaaaaggaaagcagaaaagaaagagacagaggaaagactggaaaaacagcgtgccgaaaaacaggatcaggaagaacggcaatataatctgaaaattgatggaaaagatgtagctgacctgacaggaaaaatggtggaattggtaggtacttcaattcctataggagtgacggaaagcggagtttcgacatttgatgtgctggcatagaaactgatatgagtatgccgggatgtattgacatgcagaatgtatttttatttctttcggtgggactggttgcgattaaccttatccttatggagttcatgcagaataccattgaaaaagaagagagaataaaaattgcggtacttacggaacaaaatcagaaaatcgtattgcagattatcaggaccgggaagaaatctatgagcgtcagcgaagaaaaatgtacgattataaaaatcagctttccacaatccagacgttgattaagaatggacacacaaatgaggcactttcatttatgcagaaactgacagagagcatagcagttgagatgtcggcaatcaacacgaaccatccggtggtcaatgctgttttaaaccagaagtaccgcagcatgcaggagaaacacatagcggttatcctgaaagtaggggatttgtctggaagaggaagagattgtgattctgctttccaatttactggataatgcaatccgggagagtgaaaaagtactgaaaaataccggaaaagcggtcattcatctgaaattagagtgcgaagatcataaactgatatttgcggtgcgaaatccggtgacagaaaaggtggaaattgaaaatgacacgataaagagcaaaagaggggatcatcacggcattgggctgttaaatgtaaaagcagttgtggataaatatggcggcgacatggtgctttcctgcgatgaaaatgaatttaaggctgtggttatcttgtaaagagatggtctttgtgtgcgtaatatggtcgtttgatgatatgggactaggagaacaggttattttatccgataaaaaaatagaggaaataagtatgttatgagaattttaaagaatgaatatgataaatggataagtatatatagaggttaaaatatatgcagagaaggtagaaaatatgaggtgaattcatgggaatttcgatttcaaatgcaacgagttctgctattacaaaatatagtgaatcgctgagaagtggagaacctgattggtctatgattccaagtgcagggaaaagcaataagtcacaggcagagtttgtctctgagattaaggaactggctcagagagctgccaacactacgagtaaaacggaattagaatctattcacaggcagagaacaaggttatgtgcagaatacatatctgatgtatcccctgacagaaaggcattatatcagcaggctaaaaatgcggtaaaaagtcaaaatggtaatccgaaatgcaaaggaatcggagaattatcattgctcgattttctggagagggcagaggggaaaaataacaaccttgcgcaaaagaagtttgctctggcgggaggaggcacactggaatgtccgattctgacaggcgaaggatatggtgccgacatttcttatcaaggaacaaaagtgttgacctatctgggagatagttatggatggggatgcgaaagaactccggctgagcgggaaaaggaaagagaattttacggaatttacttcaatgaataccatacgcaaaagaatgcccaaagctcagaattgaaagaactgccgaactatttggaagagaaaacgtcttttgataggaaagcgtaaggatataggtaagataacaggtttaatatgggaggtgactttaatgaaagatttttcatgggaaattttcgctataaaaacaataatttttagtatatggtggttaagtacacttccgtttctttcaattattgttcaatatattgactcaataaccggatttagttctggaaacggatatcataccaatcacatggattatatttttgaaagtcctcttgtttatatgggagttgttctttgtatcaatatcatcctggcaatcgcttacttgatatattgttttcataaagcaaaacgggaatgacttttaaagaaaaattaaaataaagtaaggaaagtttatattatagacaagtgtttcgggacagaaactgcgggatagcattatatacagacacagaaaagacatcatcagacaggcattcaacattcataggatagaaaatctcttgaaaagtgaaaagattgtgttataatacatttaacaattaagctaaatgttaaatgaaggagagatagacttgggaatgcaagacacgcttcgtgcgattgccgatcctacaaggcgtgagatacttaatctactcaaacattcaaggttgtcggctggcgagatttgcaatcatttttcgatttcagatgcagcagtttcccgacacctgtccgttttaaaggatgctgatctgattcgtgatgaacgtgagggaaaatttatctattatgagctcaatgcatctgtgcttgaggagattattttatggattagtgaattaaaaggagaagatgactatgatcagacaacataaaaaaatgattttactcacatcaattataacgctgtttccgatttttatcggcttgctattgtggaatcaattaccggattcgctggcaacacattggggaataaataatgaaccaaatgggtatgcatccaaaacattcgctgtgtttggacttccgctcattatgttattgggacatgcagtgagtgtgattgcaatgaatattgatcctaaagtaaaaaatatcagtgaaaaagtatactttgttatcttatggattattccattgttatcgcttttcatttgtaatgtactctatggatataatttaggatttcagttggatatgggattcctgtgtggtctgatgatcggagttttttatctgattttgggaaattttataccgaaagtaaagccaaactatacgattggatttcggatttcgtgggcattatgcgatccggaaaactggtatcgcacgcatcggtttggaggaaaatgcatggtgatcggtgggattatcatgattgttacagcaccattccaaaatatgtggatacttattgcacttattctcgtcccttgcattttaccggtaatctattcttatctgtattaccgcaagataatttcataattatgttattccattttacattcaatcagcgggtaatatgcccgctgattttttcgtcattcatccagagaaactaccgatggcaggtggtatatattttatttatgcaatgtatggtctttgtgtgcgtaatatggtcgtttgatgagatggggctaagagaacaggttattttatccgataaaggaaatagagaaactgagcagattattaacattggaaaagttataattttttggaatagagatgggaggatgttttatgtcaaagattacagattatgcttttttatttcaaaaaacattcgggacatcaggagaaaatataataggcagttttcagttgtctcagttgaacagcagttctgttcagtcccagttaaaagctgccgggtacacccttgaaaaatatgagagaatttacagacaggcattttatgatgccgcaaaaaaggctgatcctaactgggaaattagtaagccaattaaagatggtgcattagatagtgttacaagagaattggcagagtcggggaaatctcctgcacaggcaacacttgatactaaaatttaacatatcaggtatatttgaataattaaaaagagaaaattttgagctgattggagaaacaaaaatatgaacgttagttctagcctgaataccgtatcttcatcatacggtcaacaaaaaggtaatcaaatgaaaactcctgcatctggggaaaagacattttatacggcagaaacaccgaaggtatatcagatatttacaacagataatatgttgtggacgggaggtaatggaacaggtctttcttattgtcttaaatatgcggatgattcgacggatgaaaatcctgtagtgttagcgagaggtgtggatgaaaatggaaaagagtttgaacaaagaatatatataaatgacgttaatccatcaaatgctacagtagtcgaaatgcgtgcattggaggcacattacaaagtggaaaagcagggaggtttcacgtctctgccacttgaagctggtaatatgggacttaacgacagaagagattttatcgcaatgttcaaaaaaagcatagaagatttaaacaaattgggaaggtttgacttatcgttgctttggacgaaaagtatggatacatatcttaatttgccaaatgcaaatagtaagtataaataaggcttagttatttggacatagaaggaaaagagaatttagaataaacgaaggagattgagacaatgcagtcaatatcaagttatattaatcctaatacaagaggacttacatctaattacaaaaatacagctattaaagataaggaaacctataatgaggcgatgtcgcagcacttactaaatccggtagaagatttggttcaagtgttaaaaacacctataaaattggcgaagagttcgtcacttagcagacagaataattctgttaatattgcggaagggcaaagaatccgtgttaatggaggtcatgtgcttacggttacggcgcatggagtagaggtttctggtggagataatccgtatgatacacaatcatatgtaaaagcacagagaatggcagatgcattggcatccatgctgcgaaatgcaggtgggacaatgactactgtagcacattcaaaggaggaatatgcccggtatacagagggaattacggatgttatgtcttatctgggtgtagacacttccaaagattttacggtcaatggtatgaaatatagcaaaaataaagatggttggtatgagtcagaagcgaacagtgatgcgcaggcggcatatgaacagttaaaagcgaataacagaacctaccagtttgcagatgaaaagaccaaaaagcagattgcatatattagtgattattaccttcagacagtgccggagagtgtaaaggcggcgtggcaggaaacattggaagaaactggttttaatccatttcagacggatgtaaccagtacattaacgcagttatctgtagagcaggattttctgacaggtggtgatgacaatatttttggtgaaacgaaagaaagttgtttagcagctatcgacaaagtattggagagaatagaaaatccgttggcagcagttacagaggaaagggcagcatatctgcagcaggaaaaagaattttataccgtactggcatctaaaataagagaataaaatgccgggaggaatttaaaaaatgattggaagtataggagcggagagccgttattcaacaggttataacaacctaaaaccaaatcggaaccagaataagtgggctgacactttggctcagacggtggataaggaggatattagcagtagagcggatatcaatcgtgctaagaaaagtacagtgatggattcttatctggcactgtcaggaaaaacgataaatactttgaaacaggaatattcagagtacgaatccgaaaattatagaatcgtacccgataatgaagctgaatgttttgatatatacaataaagacggggagcgtttgggggcattttcctattctgatataaaaataagacaggatgaaacaacaggaaagcagtttttgatttctgagcatggaacgatgagttacgatgccctggtattagatgatgaattaaaagatgcattgcagaatgtaatggataaagattcgctggatgtggagactttgcagggatttacattaaatacacattcaggtaccggcatccagtatttagtaaaagacggtgaggaaggcagaggtggcaaggttcttctgcaaaatgaagcggatcggaagaggtatgaagaattagcggagatgtattttgacaaataccctaatttaattgagagtcgggaagaaggttttatctgggctgatttagagattagaggaatggcaaaacggacagatcagggaattatatccataggagctgatggaatgtcatacagtgacaatgaaaattataaaaacaattggagtgtccagttttctggttctatgtatgaaaagctgtatgaatggcttcagaataacaaggatagcatggaggaaatccataaattttctacatggcaaaaggtttttgacgaaattggtggaacgtatgaaagagtctggtcgaaagaagaactggatcagggatatttgaataattgaaagaggtgacaatatgaaaatatttaattacatgaataatacgaattcaataatggaaaaaaatactgataaagtacagaaaggaaatagtcagacaaacgaaaaacatacagtggggcaatcagtgaagctttcgatttctaatgagggattggagtattatcgtaatcgtatacagcagagtggacaggaaaaatatgatgatgtggttcaaagaaaggaactgttagcgagtaaaaaaatcagtgatattgattatagttatgaaattcaaaagaaggcagcacagcagaatcaaaatgttgatacaggaaaaagtgccttaaatattactgacaaggcaaataattatgttaaagcatacgcagaattatatgatgaaattgtgaagggctatgaaaatggaaccagagaaatatatgtagctgatgaaaatggacctcgtaagcttacaaaggatgaagagttaagcaatttagatgctgcatataaaaaaacagtggatgactttgtgacaatggagacaaccaatcagcatgcccgtggaattattggtgaagaaatgaataaaatttcaaaaattaccacaaggtcaactttggcatcggcttacattgaggagcaaaaaaccaggggaaaggacgaaatcccagaaaatttaactgagaaaatgtatggtgcaattacctcatttaaggagaaatatacaatgattcagcctaatagagagcagttattgatgagtattaagatttgatgatgttagtactatgatttacaaataaaaatagtaattacatatcatattgaggctgagagaaattaaatatccaagtcgttcaatataatagaaattattttaagtttcaataacagggaggtaggattatggcaattannnnnnnnnngcacatcgtattatgcttcaaattacaagaatactgttaaaaaaacagatagtgaaaaggatagtacaaatacaaaagacggcaacgtgacaacaagtacagttgaattaaaaacatcacgtcccggtgtgacaaaaacagagcagattaagacggggtatagcaatgtaaatgattattcaaaatacttgcaaggaaaataccattatatgaatacgggaacgacttcaatgcaaggggttccgacaacagtatccgtttcaagtgcatttttacagaagtgtatgaatgatccagaaaaagcaaagtatctggaggaaaacttagcagccattccagattgtgcaaaaagtgcggtgaatggatgtttgggcactttgacaaatctgagttatatgattgatgcaaacggaaatatttcggtggcaatatctggtacaaatgatccagatgggaaaatagcgaaagagaatgctgaacgaaaagcaaaagagaacagagaaaaagaggaaaaagtaaaagagaaaagagctgctaaaaaagcagaggaagaaaaagctgcaaagaaacgtgcagaaaaatcggcagaaagaaaggaaacgggtgattataccttatccgtaactggtactgatgtaaaaagtatgacacaaagccttgtagcagaatctgtgagtatttctgtacctgatagatcgagttttgatattaaggcataagaaggttcggtaaaaggaaaatatcaaatcggtactttggttggaactgcgattttggctaaaagattgtgaattgccaatataatcaatagtttcttctatgaaaagataagatgacagggtggaaggctatggagagctgaccgccctgtttttatccagaaaaatgcagaaataatcaagagaaaatcaaaatctttctgctattctgtttcatgggttttatatgtacgaagataggcttctacaagtgcaagaatggtggttatctgatcgcttgtacattctgaaggataaaccaacagtctttggtaatccagattatcaaatgaatagcagttctgtacagaaacaattaaaagcagcagggatcgacacaaacagtaaaaagtataaagcagtactgagtgagatgatgaaaaatggaaacggtgcaatgtttacaaatgttcaggcaattaagaacctgatgagccagtatgacaaaaatggagactggattgatccgaataccggattaacaggacttgctgtaacggatgagaacagaaacagttataaacatatcatttgaggcggtttttaatgcgaaagcctaatgaaagaatggaggtattataaaatgtctagtgtgaacaattatatgaatggcatctatgacaataacatatcctgtaggagttgcatgttctgcgattatgtattttataataaagcaaaatggtaattttttgaaaaaagtttcggattagatgtagtgtttgccgctgaaaccgtagtatatgagtgaagccggaaaggaggcggtgtgatgatagacgatgaaaaaatcatagaaatgttttttgagcgttcggaacagggcatacgggaactggacataaaatatggaaaagcctgtcacaatctttcctaccatatagtagggagcagataggacgcggaggaatgtgtaaacgacgcttatttaggtgcatggaacgccattcccccagcacgacctaacccattgttgtcgtatcttttgaaaatcgttcggaatatttcgctcaaaatctattggagaaaggaagcagccaaacgaagcagtcattacacgattgctttggaggaaattgaagcctgtattgcagaccagaaaaacattgaagaagaaatcgaggtcagagagttagcctgtatcattgagtcttttttagacacgctgactatcgaaaaccgcgttatctttatgcgccgctattggttttccgacagctacaaggacatagccgagtttgtagggctttcagaaaaaaatatttctgtccggctgacccgtatccgcgagaaaatgaagcaatacttgattgaaagagaggtattcgtatgaacgcaaagaaattttctgacgctatgagcgagcttgatacaaaatatgttgatgaagcactcaactacaaaacgaaaatgaaaaagcctatatggataaagtggggaattatggcagcctgtctttgccttataatttgcgtagttacaattccgcgtttacttaatggctctaatccccctatttctggagatttggctcctatggtttatgtaaataacaagttgtatcaatatacggatagtcaactcgattttacagataaagaaagccagttcacttatttaggggaaatcgaaagcaaagttagctcatcgcaagagccaaaagagaatttccaagccaatgacgatattgtaggtgctaaagtatatcaatatgaaaataatattgtggttttaattgatggtaaatatttcttatatagtcatatggaagatgctgaaaatgaaacggttgaatttgaaggacagttatttaacaaatcggacttatccgaagaaacccttgaatggcttgagtggtataattcgataccgccagaaaaacaacttgctgtcaattcaattccagccgagctatatactgatgacggtgttggaacggttgacgcagaccaagaaaaataattttgattgacacccacaagggacagccgagattgaggatggaaagaagaaaatccgccagtttgagaacttggaaaagaggttgcgtcaaaagttatccaaagaggaacgaagaacacgcaacaaccacctgtataatcaagagggcacttaacagtgaaacttatttcttggagatttatgacgatatatactatatagcattgagttaattctaaacggattttgaatttatttacaaggaggttttatatgtcaatgaatatcagcggattaggcaatacctataatggtatcaacacaaatagtaaacaatataaggctttgaaagaaaaaggctggttatctggtattatgcaaaatgaagccatgatgtcagcagaagaaagattgatatatgaaacattcggtggaagagataccattattaagaatctgatgaagcaatttgattcggatggcgatttactgaatgcaaatggagtggcgggaatggatgttaccggaaaaggtacatcatggcagcagctcacgagtgtatccgaggaatatcgtcaaaagatgtttgataatgtgaagagggaatttattaaggaaaacggtatttcaaatggtgatacaactaagcgttcagatatttttaaggattatcagttaagcgtaagtaaagacaaacgtttaagtctggcagaagcgggagtaaaaagggaagaagttttgtggttgaattacgctgatacgcaaatgtcgtttgaagcagactttccggaggtaatgccatgattaacggagaactgatcgttgacaacttcgccggtggcggtggtgcttccaccggtatagagttagcaactggatacagcgttgatattgcgatcaaccatgatccagaagctattaagatgcacaaggcgaaccatccgaacacgaagcattactgtgaaaacgtctgggcggttgatccggtaaaagcctgcggcggtcatccggtggctcttgcttggtttagcccggactgtaagcatttcagtaaggcaaaaggtggaaagccaaaggataaaaacattcgtggtcttgcatgggtagcctgccgatgggcgggattggtacgaccgagagtaatcatgcttgagaatgtggaagaatttaaaacttggggaccacttgggcggcggcaccatccgattaaggcaaagcaggggaaaacctttgaaaaattcgttcagcagctcacagatttaggctatgaggtagagttccgggagttggttgcggctgattatggagcaccgaccatgcgcaaacgattcttcatgatcgcgcggtgtgatggaaagccgatagtctggccagagccgacacacgcaccggcagacagtgacgaggtcaaggctgggctgctgaaaccgtatgtgggagcatacacgcagcttgacttttctcttccatgtccgtccatttttgatacgtccgaggaaatcaaagagaaatacgggatccgggcggtacgcccactggcaccgaagacgatggagagaatagcacgaggactgaaaaagtttgtactcgataatccagaaccgtttattgttcctattgggtacggggagaggaaaggacaggcgcctagagttcacgacatcgaaaagccattgccgactattgtggggagcggaaagcattatctgtgtgagccgactcttgcaccttatatggggacaaatacaacaaatcatccgggtggaaactgcaaagatccgatacatacgatcaccacaggtaatcaacattgtcttatcagccctacgcttatccaataccattctgaaacggcgcagggagaagttcggggacagacgattgaagaccctataatgacggtggacggatcgaacagatatggactggtcacatcattcatccaaaagtattatggcggaaattatcagggaaacggctctgacattaaagagccattgcacaccattacgacacttgaaagaaacgctatgtgtgcagtaaaccttattcagatgaataatcattgtgatggaagggatgtaaaagagccaattccgacaatcacagcaggagacggtcatttcggagaggtgagagcttttttaatcaaatattatggacagggaactggacaggatataaaggcaccgttggacaccgtgacggcgcaggacagattcggactggtaaccatcaatggcgtagattatcagatagcggacatcggactgcggatgttggagccacgggagttgtatggatgccagggttttccagaggattacataatcgaccatgattataccggcaagacgtatccgcggagcgaacaggtgcgccgatgcggtaatgctgtgtgtccaccgataccggcagcattagtcagagcaaatcttcctgaattgtgcgtagcggaacgtatgccaaacatgaggattaaaccagagcagaccggacagctccggtttgcatgagatcaaacagctatagtccccgccagcagtaatgcggcggggcggaagatgacacacggggaagttgagagaggggaatgtctatggatgaaaaagaaatatttgaaatctgccagagcgtggacagcatcattgctgcggaactgacagaatccatcgtgcgcggcaccagttacgatatgctggaagcccaccacggcattctcccgatcagcaggaggggattctatcggagacgtggaacggcacagcgacttatacggcagaggatggcacatctggtggaagaaaagaacgggcagtatatgattgtatgggggaagacgtaaaaaatttgcatattgacgaatgtagtgatataatttctatattaagttacaaagggggaattattatgtcaaaatgtattagatgcggaaagaatgaaggtatttacccacattacaatggtggaaaagtatgcgaacaatgcttgggattttattttcagtgtcctgattgtacagttgtatatgatagagatgaccctgaacattatgatgctggcgggttttgtccaaaacatatagcagatcactaaagaaattgccaaccgtcaatatttgatggttggtatttttttgacctaaacttggcacaaatccactcccaacctattgtatgatattatcagaaacattgcagtgataataccagaaaggggagaatacggtgggagtagataagaaaatattggagcagtatgtagatgcatgtgagatgatccgggagacggagcaggacattaagagattgaagcgtaagcggcaaacgattgtgacaggaagtgtaaaaggttcaatgaatgatttcccgtacgcagagacacatttcaaaattgagggaacatcgttcacatacatggatgatgcacagctgcgtatagaagagaaactgctggaagagagaaaagcccagtcggaagagatcaagctgcaggtggagcagtggatgaacggcataccggtacggatgcagagaattatccgttataagttctttgagggactgagctgggagcaggtggcagtaagaatgggacgaaagtgtaccgagggaagtataaagatggagtttcagagatttatggacgctgcgtaaaagtttgttacgattgttacacatgttacgaaaaatcaatgtatagtataaactgcaagaagtgaattgagagagccaagagccatttgctttttgcaactcccccaacccagagaaggcgcccgtttaatgacgggtgcttttttgtatgtaaagaaaaggtaggtgatggtccttgccaaaggcaaaagatgcgagagcggacaaagcctttgaaatgtataagcaagggcttaagctaatagagattgcaaaccagctcgggatagccgagggaacagttcggagttggaagaaccggtataagtgggatgataacggtaatgcaacgttgcaaaagaaagagaaaaaggaacgcaacgttgcgaaagagaataagcaagccaagagagtaaagaaagagcctgttgcgcatgaagtcgaagcggtgatacagaatactgatttgacggataagcaacagcttttttgcatttattacattcgctgctttaatgccaccaaggcatatcagaaagcgtatggaagcgactatacaactgcaatggtaaacgggcatcagctacttagaaatactaaggtaaaagatgaaatactccgtttgaaacaggagcgtcttaacagggagttcctaagtgaaaccgatatctttcagaagtacatggatattgcatttgcagatgtgactgatttcgtcacggtaaaaggcgagacagtgcggatgaatgagaatgtggacggcagtttgattgatgaaatcacagggactgcttatggtgtgaaggtaaaacttgccgaccgcatgaaagcactacagtggttatctgaccatatggaccttgcaacggataagcagagggctgaaattgcactgttaaaatccagagcggacgctggcaaggatgaccgggagaataagctggataaattctttgagcagatagagggtgcattaaaagatgctgagtgatttatacacaccaaaacagcttgatacattccgatttgctgtaaataatgattattttatgctaatcaatcacggtgcgaaacgtaccggaaaaacggttctggacaatgacctgttcctgtatgaattacgcaggattaaaaaaattgccgctgcacagggcgttgagaatccgcaatatatattggctggtgctgacctgggagcgcttaaccgaaacgtgttgattgagctttccaacaaatacggcattgagtttcactttgataaatttaatcggttcaagctattcggcgtgcaggtgtgttgtttcggacattccaagataaacgacctggggcgcatccgaggaatgactgcatacggggcttatatcaatgagggcacgatggcaaagcaggaagtgtttgacgagattaagtccagatgttccggcaatggtgcaaggatgctgattgatacaaacccggataacccggaacactggcttaagaaagactttattgataaggcggatggaaaaaccatcaaggcagtgcaatacaggctggatgataacacgttcctgtcagaacggtataagcagaatatgaaagaaacaacgccgtccgggatgttttatgaccgaaacattaatggaatgtgggtaatgggcgagggtgctgtataccgggatttcaatgcaaaaattcattacatcagcagagaggaactgcaaaaggtcaattttgttaaatacatcgccggggttgattggggatatgagcattttggagcaattgtactattgggaaaggacgataagggatgctattaccttatcaaagagattgcccgacagtatgaagaaatagatttctggctggagcaggcccaggcaatcaaagccgagtatggcaatataccattttattgtgattctgcccgaccggaatatgtgaaaaagttcaagcagaatggcttgcgtgcgattaacgccaacaaggcagtgttaagcggaattgagcgcgtggcacagttatataagcaagataagttacggattgcggatgatgtcgaccggttccgggatgagatttatatgtacgtttggaacgaaaagaccggggagccggtcaagcagtttgatgatgtgcaggatgccattcggtacgcaatatacacggacgaaaaccacggcggcatcagcattttaaaatagaggtgagaacatggaacttgaggtaatgaaaaaactcataagaaaatacgaaccgggacatacacggttttccttgcgggcgatgcaggcggaacggtactaccggaatgaaacggatattctggtaaaaaacaagctcacagacgaaaaagagaaagaggaacccgacaatccgttacgtaacgcagataaccggatcccccggaacttccacgggcttatcgtaaatcagaaagctgcgtacatgttcacggcaccgccgctctttgacattgggaatgagcatggaaatgaagtcgtgacagaagtactcggtgatgaataccggaagaattgcatggagctgtgcataaacgctgccaatgcgtcagtaggctggattcactactgggaggatgaagatggagcattccagtgggcggtagttgacagcaagcagattattccgatcgaatctcatgatttgaaaaagaaactgcttggcgttctccgtatgtatgatgaaatcgacgaagagacgggagatacctatgcaatctatgaatactgggacaaggaaagctgctggacattccggcggaagaacggagacaccttagaggatggtttgttctattacaatacttttatggtgccggattccagtgattctactgcagagtatcgtcatgaatttggagaagtgccgtttattccgttcccgaacaataacaccaatacgaatgatttgaaaaatatcaagccgctgatagacgtatacgacaaggtctacagcggttttgttaatgatttggatgatattcaacagctgataattgttctgtccgggtacggcggcacagatcttaacacgtttctgtcagatttgaaaaaatataagaccatcaaggtagatggggacgagggcagtaacccgggagtgagcacactcaacatcgagattccgatagaagcccgtaacagcgctctggaagtcaccagaaaggctatttttgaacaggggcagggatttgacccacagccggagaacttcggaaatcagagcggagaagcgcttaaattcatgtattcgttgcttgaaatgaaagccgggctgacggagacggagtttcagcttgggtttgcccgtctggtaagagcgatatgccaccatgagggaattgattgcaagaaaatcatccagacgtggacccgcacttgtgtaaaaaatgacacggagcaggcacagatttgcaaggattcggttggaattgtcagtaaaaagacgattctcaaaaatcatccgcttgtcgaagatgcggatgcggagctgaagcagttggagaaagaggcgcaggaggcgcaggagaaagcagatgcttacatcggtgcttttggtgcaaagggaaaggagacaggcagtgagacagacggcgatgattctggggacggagtatcggatagagatacacaagtggtcagaagataaggaactgagccaaaattcatgggcgggctattgttgcagcaactttccactgattgttattgcagatttggatgatgaagaacatttttggtttagcaatgaagaggaaaaggatgcttatttcaagggatgcctgcgtcacgagattattcatgcttttttgaatgaaagcggtttgaaagataattttgagcacgttaatcgtatggggcatgaggaaacaatggtggattggattgcggttcaattcccgaagattgcagccgtatacaaggaactcgggattctgtgaaatgaggtgagtgcatgggagaacggacaagtgaatactggcaggagcgcttccgacagttggaagaatcacagcatgatacgtccgttcagaccgtgcaggagattgagcaggagttccggcgtgcagagcaggcgcttgacgggaagattaacgcctggtatcagcggtttgctgccaacaacggcatttcaatggtggaagccagacgtttgcttaacagtgacgaactggaagagttccggtgggatgtgcaggattatattaaatacgggcgcgagaatggcataaatcagcagtgggcaaaacagcttgagaacgcatccgcaaaggtgcatatcagcagattggaagctctcaaggtgcagacacagcaggagattgaaaagctgtacggaaattatcatgattccatcgatgaacatatcacaaatctgtatacatccgggtattaccatactgcatacgaagtgcagcgaggtatcggtgttggctggcagatgcagagctttaatccggaaaaggtcaatgacatcatacataagccctgggcggtggatggacgcaacttttcagagcgcatttggacggataaaacgaagctgattaacaatatgcacgattccttaacgcggatgtgcatcaccggagaatcgccggatcgagccatacgggaaatatcccagaacatgaaagtaagcagatcacaggcggcgcgaattgttcagacggaatcagccgctttttctgctaaggcacaggaaacgtgcttttctgaccttggggtggaggagttcgaggtggtagagacattggacagccacacttgccccacctgcggggagatggacgggaagcactttccgatgaaagactataagattggtgttaccgtgccgccgtttcatccaaattgcagggggtgtacctgtccgtacttcaatgatgaatttaccacgggggaaagagttgcgcgcggggcagatggcaagaagtattatgtgccggagaacatgacgtatgaggagtggaagaaaaattttgtttacactgattggaaaactgccgacataaagattccgagtgacattatgaatatttctggaatgacaccagattatgcagatgctatagaacgtgtgtatgaaaaaatgaaaaaggagtacattgtaaattttcaaaatgtcacggttgaaaattggggagcaaagaagcctgatgttccattcttttgccagtattatgaggaaaatgggaaacatatggcgaaattggtggttaattcgggatatgatttttctggatttgatgctattataaaggcagggtatgagtataagtattttgcggaaaagcgtattgaagattatattgaacatgagatagtgcacatattgacggggcaagatattgaaagtgtagaggatttcaacgcattttttgaagaggtaaaagacttatatgtacctggagtttctggttattcggatgaggtgcagaatggatttgaaacgcttgcggaagcatatgttaagataaaaaatggcgaagatgttccagaaaaagcaaaagaatatgtcgatcgatatatagaaaggtggaaacggtaatgcttagaattccatactgtttatcatgttcaaattgcatgccgggtatgcgctgcgacgcatatccagatggtattccaactgaggtattacatacaaagaaaatagatggagagatatgcagagataatatagggtttaaaaagaaacaagatataccaccagccgataatggttaggtggtatttttataccccaaattagtaatgacaggacaaccggaaatttatgaaccgaacggtgcagaggtgacgccaagtaggttcctccggcagtcctgtttttatattgtccgaaagccttatgacgtttaaactgcggcaatttgcccttatgcatggcatcaaaactgcatactgcttgtggagacaccacgcttaaaaacggtgcaggaaaggaaactatggaatttttaaaagacattttaggcgaggatctctataagcaggtgtctgataccgtcaatgcctataacggaaagccggagaataaggataagcaggtaaagcttgcagaccttggatctggtcagtatgttgacaaaggcaagtatgataccgccgtggcagaaaaagagaatcttgccggtcagattaagacactcaacacaactatcggagatttaaagaagaacaatgccgataacgagacgttacagaccactattgccaatctgcagggagaacttaaaaaacagcagactgcaagcgaggagattgcgaagacctatgcgctgaaagattccctcacaaagcagggcgtacttgatccggattatctgatctacaaagccggtggccttgagaagttcaacttcgacaaggaaggaaagccgatcggcgtggaagaggttgtgaagccatacaaagatgatgcggctatggctcacctgtttaagcaggaacagcagaaaccgccgtacaacccgaagaatggcggtgcaggcggtgtaacgaatccgttcgcaaaggacacttttaatctgaccgaacaggggcgcatgttaaaagaaaacccggcgcaggcaaaagaacttgccgcagcggccggagtaacattgtaagaaagagaggatgataatttatggcaattacaaagattgcagacgtaattgtaccggagctttttaaccggtatgtaatcaacagaacgatggagctgtccgcgttcttccagagcggaatcgtggtaaacagcccggaatttgatgcactggcatccgaggcggcgagaacacacaatatgccgttctttgaggatttacagggtgagtccgaggcaatccttgaggatgtgaagatgaccgcaaagaagatcggttccaacaaggacgtatccaccacgatttacagacagaatatgtggggagcaagtaatctttctgcagcactggccggagccgatccgatgaaagccatcggtgatctggtagcatcctactgggcaagagatatgcagaaggagcttatctcaattcttgccggagtgttcggcaccactactgcaggggcagagggaacaccggcggcggaaaccagaatggcagatcatattcttgaccttaccaccggaaaaacggatgcggcaaagcagatcagcgcatctgcgtttattgacgcatgccagctgctcggtgacgcgcaggcgcagttatccggcgtagcgatgcactcggcgacaaagtcttatctgaaaaagctgaatctgatcgagacagagcgtgattctacggatgttgagtttgacacctatcagggcagacgcgtgaccgtggatgatggctgcccggtaacttccggtggcgtgtatacgacatacctgtttggcaatggtgcggtagcttacggcaatggttctccggtaggatttgtcgctacggaagttgatcgtgacaagcagaccggcggcggtattgattatcttatcaaccgtaaggcgttcatcctgcatccgagaggaattgcgtacaccggagcaaagcgtgagcatgtggagacaccgcttcgtacagagcttgcaatggcggagaactggaagccggtatatgaaccgaagcagcttagaattgtagcaatcaagcataagatcggttaggaggtgcggtatggcagaggaaagcaagctgacagtcgaaaggctgtcggcgcttctcgggataagcgacccggatgagacagtgaaagtccacttggagtttgcgcttgaaaatgcagaggatacggtaagaaactactgccatatcgacgagattccggcagggctggaaaccacggtactgcgcatggcgatggatatttaccggaatgagcatatggggagtgccaatataccacagacggtttcttcggtgcagatcggcgatacaacaacatcttttaagacttccgcggcggagttctcggaaagccttatgaagaattacaagccggtgctgaaccgttaccggaaggtggtgttttgatggatatggtcagaatggcaattgaagccatgtatgaagatacctgcacggttgtggaacaccgtaagaccaaggaaaagggcgttgtgacatacacggacaccgtggtcttggaaaatcagccgtgcaagctgtcgtttgagacgatcgcacaggcagaaaagaccgatgcggcatcgccggtagcacaggcagtaaaattgtttgttgcgccggaggtagaaatcaagagcggttctaagatcatcgtgacacactgtggcaattccacggagtacaccaggagcggcgttccggggatgcacccgacgcatcaggaaattatgctggatttatttaaggagtgggcttgatgggaaatacaaaggttgatctgaaacaattggaggagttccgggatagagttcagaaagctgccgatgaggaacagcagagagcgttcatggaagcctgtgccaaggagttggcagcacgattgctggcaaaggttattaagcgtactccggtaggggattattctggagaagcatatgagtgtaaaggaaaggatatgaactttactcatatgggaaataaagtttctggaaagacaggcggaacgcttaggcgagggtggactacgcaggcagaaggaagtggtgcggaaggattggattcaaaaagtgcagtgcagttcgtggacactttaaaagtaaatcatttcggtgatacttatgtgattgaggtacgaaacagcgtagagtatgccagctatattgagtttgggcataggaaagcaaaccataagggctgggtgcctggacactacatgcttaccatgtccgagaaagaaatccgcgatgcggcaccaggggttcttcggaaaaagctcaataagtggctgaacgaggtgtttgcatgatcaacgaagttttaaagggcatcacagatgccttatatgccgcatttggcgatgactatgaaatccatacagaagcatcaatgcaggacatggaagagcctgcattttttgtgcgctgcatcaatccggatgtgccgcgagggcttaccggccgcagaaaagcaacattgctttttatcgtgcagtattttccggaaagcgacgagccaaagaaagagatcaataccgtttacgaacggttgagcgagtgtctggaccttatagaggtagaaggtaaaatggtgcgcggtacgatcgaatgtaaggacatatcggacaatgtgatgtcggcaacgacagaatatacgttattcctggggcagagccagaaagatgcgtatatggaagaatgcgaagtgaaaggagaggtaaacagtggcagaagcagttaataaggttacttataccaaagagcagatcattggttccaagaaatatgcgggcaaggtggatctcctgtcggcattattggaaccgggaaaatcttatacgcttgaggaagtggataagaaaatggaaaaatacatgaaaggagcggtgcgataatgtacggaggtggacagtggataacccagaataaggttttgggtggtgcttatatcaattttatttcggcggcgcgcgtgaccacgaatctgtcagagcgtggcgtggcatccatgcctcttgaacttgactggggtgcggataacgtgatgatggaggtggcacaggaagatttcattaagaattcgcttacgctgttcggttatgcctatacagatgataagatgcagccgttgcgcgaactgtttgcgcatgcgacaaaggcttatatctataagctgacatcgggcggtgcaaaggcggaaaatacctatgcgacagcgaagtgctgtggaatccgtggcaatgatctgaaggttgctattgcggcgaatgtggatggagatggctttgacgtgaagctgtatctggatgcgcagcttgtggattcccagacggtagcatccgcggcagatctgaaagaaaatgcctgggttacatggaaagaaactgcacttgaagcaacggcaggcgttccgctggcaggcggtacgaatggaacggtcaatggtgaggtgcaccagaaatacctggatctcttggaatcatataccgtgaatacgatcggcgcgagtgtgagtgatgctaccacggcgaaactgtacgccgcatttgcaaagcgtatgagggacaaggtcggggcgaaattccaggcagtcctgtataactgcgcggcggattatgagggcgtcatcaatgtgaagaacagcccggatgtgattccgtgggttgtgggtctggaggcggcgtgcggggttaatgcaacctgtaccaacgcgatctatgacggggagcttgagattgacaccgcctatacgcagacacagcttgagaatgctgtgaaagccggtgaattcgtcctgcacagcgtgggaacggaagtgcgcgtcttagaggatatcaattctcttgtgacacttacggaggataaaaacgaactcttccagagcaaccagacgatccgtgtgctggatcagatcgcgatggatatcgcatcgctgttcaacacgaagtatcacggcaaggttcagaacaatgaatctggtcgtgtcagcttatggaacgatattgcatcgcatcataagcagttagagcagcttggagcaatcgagaatttttcggaggatgatgttgtggtctccgccggaagcgagaagcgcggcgtatatgtggaagataaggtgacgatcgtcaatgcaatgtcacagttgtatatgacggtcgtgattgagtaggaggtaaagagatgtttaacgcttatatgaatgaacaggatgtgccgtctgcaaaagaggcggaagcttttgtcacggttggcgaacagcggtataatctgctgaacgcaaagaattttgagggcaaggcaaacatcagcaccaaggagatcccggtgctgggaaagatcatttccggcaggaagccgactggaatggtcgtgcaggcaaaaatgacggtctacaaatgctcggagatgtttgaccggatcgtaacagagtacaaaaataccggtcatctgccggtgtttgaattgcagacaacaaacaatgatgcggctacctgcatggggcgcagtacaaaggtttatcacaactgcgtgatcgacggagatgtgctgctgtcaatgtttgatgccgagggcggatttgtcgagcaggagatcaatttctatgctgcggattattccagcccggaatcctacaaggagccgtcctacctgtaacaagtcaacggcggcgggagactgccgccaattaagagattgaggagaaaaaacatatgggaaacttaaaagcatttttgaaacagaataagaaagccaaaaagacaacgcagtttgctgccacaaagtcactgtgtgatgagaacggtgatccgttactctggacgatcagacctctgtccacaaaagaatctgcggcaatccgggaggaatgtacgattgaggtgccggtaaccggcaagcctggactgtatcggcagaaggttaatacggatgagcttctgagaaaaatgatttgcgccgcggttgtggagccggatctgcacaatgcagaactgcaggattcctatggcgttatgagcgcagaggcattgattgtggaaatggtcgacaacccggaagagttcggtgagcttgccacattcgtgcaggaatacagcggcatcgacgagacgctgcaggagaaggtggacgaggcaaaaaactaatcaatggcggcgacggtgaagcggcatatgcgcattattgtttgcagaagtttcactggctgccgtcattcttttctgaattggatcggaatgagaaagcttttgtgattgcgtccatagatcttcgggtcgaggaagagaagcgcaaggcaaaagaaatccagaagtaggaggtaagaggatgtcaagtattcagactgcgatagagttgtcggaccgtatgtctgcgccgctctacaatatctgtacggcggtgaatatggtgataagcaactttgaagcgctggaatatgcatcaagcaccgcgattgatacgtcgtcgatggaagaggcgcggcagctgcttgccgatggcatggtgggtttacaggacatcacgagtgccacggagagcgcgcgccggaaacaggaggaatacaaccagaagatacaggctggatcacagcatacggatgttctcttgaataaggtaaaatcgcttgtcggagcgtatgttggcatttctacggtaaaaaacgcactggatctgtcggatgaacttacgcagaccacggcgcgccttgatatgatggtgtcgcagtataatgctttgaatggaacaatgcagacaacagatgaactctcgcagatgatcttcctgtcggcgcagaattccagggcgtcttatatggatacggccgcatcggtggcgaaactcggaaataatgcccgggatgcttttgcatcgaccggcgagattgtgcagttcgcggagctggtaaataagcagtttacgatagccggggcatcggcaacagaatcgtccaatgcgtttttgcagttgacacaggcgttagggtctggcgtgctccgtggcgatgagttgaacagtatcttcgagcaggcgccgaacttgatccagactgtggctgattacatggatgttccaatcggtaagatccgggaaatggcatcagatggacagatcaccgcggatattgtaaagaacgcaatgtttgcagcggcagatgatatagatgcaaagttcaactccatgccgatgacctggggacagctatggacatattattccaatcaggcacttatgacatttcaaccggtactacagcggctgaatgagatggcaaacgatcagcatatgaaaacggcattgaccggaattatgaatgccctgtccggggcggcaacgatcgctttgaatgtgatcgatgtaatggtaacgggcggggcgtatatcgtggacaactggtcaatgatcgcaccagttattggcggcgtggcaatagcattaggagcatatacagtagctttgggaatttacaatacagctcaagcgataagtaatggattaaaagcagcggcagcgttaagggagagtgttcatgcagcagctttagcaatgcaatctggagcaactttttcagcaacggcagcacaatatggcttcaatgcagcacttttagcgtgcccacttacttggattgtcattgccattattgcagttatagcggcaatatatttggttgttgctgctattaacaaagtgcaggggacaacctatagtgccacaggcgtaatatgtggtctggtagcaacggcaggagcatttattgtgaatacgggagtagggctattaaatgggctgatacagctcatatggagtatttttgtcgaaccgtttttaggtattgttgaatgggtgctcaatgttacaaatggaggatttgacagttttggcggagcagttgcaaatctgatcggaaatatcatttcatggtttttatcgcttggcgaggttgtcaccaagattattgatgcgattttcggaacagattggacagcggggcttaatgcgttacagaacaatgtgcttgcgtgggggaaaaatgaaaatgcaatcacgcttgacagggaagcgcccacaatcgcttatcgtgcaagttacagtgatgcctataacaagggatatgatttcgggcagggcgtagagaacaagatttccgactttttcggtggtattaaggatcttggaaacagcggagacaccggagcgttaggtagctatggagccgcatctgatatggctgcgaatgtcgctaacatagcaggtgatacatcgagcatttcggattcgttggatgtgtcggaagaggatctgaagtatctgcgagatattgcggagcaggaagcaatcaaccgttttacaacggcggaaatcaaggtcgatatgtccggtatgagtaacaccgtacacaatacaaatgacctggatggcatcgtggatggactgacaaccagagttttacaagcgatggaagtagtccgggatggtgcttaaaagtgtcgacaaatgcggaagggaggtgtatactaaaaattacaaatataaaaggggaggttcagatatgggactgtttgggaaaaagataccagatggcataagagttgtgttttatgagggcgacttggagggatttcaatgcaatttcgcaagtcaattgctattaatggacgatgttctgcgaattacaaagattaacccttatgtggaagcaaggttagatagaaacagaatatcttcaatagatattttttcggaagtagaatatatggcaaaatataaaggagcatctgttcagacatcaaaggtaaaagaaattccgaaagcgtactatgtcattaattatgttgataaaaatggagaaaagaagcatttggatttttggggaacggcatcggaatcactaaaaataatgaaaatgcgagaacagttacagaaggataaaccgtcattatcatatgatatttaatagttatccccgcttacataacgtaggcggggatttttgtaaataaggtcttgcttagtcagaagtggtctctttgcgtgtggaaatggtaatatcgtttttggttttggtaacagtattgtaagtggtaatttcatcttccagaacatgagataaaatattattaaattgctgtatgatgtataatttgtctatttctttaatttggtgctgagggataggagttgtgttatctttattaagaaaattttccatattacaccaatcggcaggggtccttattttgtataaaaggatactttttaatagatgctcaaattctggttgtataattataaaattcaaaatatcagatagggaaattccattgtatttatctattattaatggaagttgctttaatttttgaattgcttcatctgaaagatttaattggtcgcatatagttctgttttctgatgatttagaattagtaattcctattaggtaatctgttgttacattaaaataatttgcaattcgtattagtgtttcataactcggttgttgatcgccacgttcgtatttgcttagagaggaataggatatattcaagtcattagcaacatcacgtaatgatttgtgcatttcagtgcgcaattcttttattctaatcatatatgtgtacctcctagaaacataataacataaattggataaattgtaaaaatatatattgacaaagcattgattggaaaatataataataaatgtgttctgatagtaaacacgaaaggagatgagtagaagtgaaaagagtaataattgaactcgatgaagagtttcacaagcagttaaaaatcttttgtttcacgaatgatattacgctgaaagattatattactggttgcgtaaaaagggatttggaagtaaaaaaagagcaaacacgataactttggcgagtgcgtgtttactctcgtaactggaaataagtgcaagcactatttctatgtgcattgtagcttatttccgtggaaaagtcaatttttgaagaaaggaaatgaattacagtgaatgaattaatggaacaggtaaacaagacacctattgagattgcgcttggcatcgatgaagagggaatgactacggcaagaaagctgtatgcgttcttggagttagacagccgcaactattcaagatggtgcaaaagcaacatcagtgaaaacgaatttgccgatgaaaacgttgattattgggcattcgtcattaatgaagaatggggtgggcaggctacaactgattacaaactgacagcccatttcgcaaagaaactttctatgaaggggaacggcgagaaagcagaagaagcgcgtgagtactttacacatttggaggaacgtgtgaaacagaaagccattgacttttcacagctttcgccagaactccaaatgttcagcagaatatttcaatcggttgcagagcagcagttagaacagaagcgacaggcagaaaaagtggaacagctcgataaaaaggtcgactccattaaggatgtaatcgcactgaatccgaatagttggagaacggacagcgcaaagattatcaataaaattgctttgcagatgggaggatatgagcacataaaggctattcgagaagaaagttataaacttttggaagaacgcatgggagtggcattgagcatacggcttagcaataagaagaaaacacaagcattgaacggcgtaagcaagtccaagatagacaaacttaatcagttagatgtaatcgccgacgacaaaaagctcattcaaggttatgtatccgttattaaggatatggcaatcaagtatggggttacggaggtggctgcatatgtataatttctatgtgattgagggcaaaaaactcattaactataaacctggttacgagcagtacacaagggcatttactcgggtggaagaggaactggaacaaaaagcagagggaatttcattagaacagttaaaaagattattcccggagttatttgttcggagcctgtatttattcataaaatatgtaccggtggcttacgaaaaagttgaaaaaagtaatcttgaagaggaaatgatacaatatttctgggcatttatcgagtcagtaagtgccagaataggatgtcttactccacaggaatttgtccggttgttcccgataactaaggaatatgatggcgaaaagtatggcatgaaagattacttttatactgcacagaagattaaagcgatgccggatgaacctattggagaggagaatgtaagcgaatttttattcaattactgcaatagggacattgaagagtatatggttacttggatgggaattgtgaatagactgcatatgctcaatggcgggcgagacataacacttgaattttttgaggatattgggatgccagtacatacattccatgaggaagcaggatatatggttaatgatgaaacaggcgagcaattcaaaatcaagaaatctactaagagggcaagaaaattgtttagcgtggtatctgattagtaggaggtgcaatatggatagaacggcattaaaggaacgtgagaaaattattgagttaatgagcagcgaggcggacaatcaaccaatggcaagccagagagtaatagaagcacgagatgttcttgatgatgcgctagaagaatatattgttgccgtgcaggaagatgctttttactggggatacatgacagctatgaagcggtgcgagaaagctggggtggtaagatgacagaagtagagagaatgacagtggaactgttagaagaaatggatgatatgtcaccggaggatattgagaatttcagaagggaatggtttgaaaagttagagccggagcaaattcgcaatgaaaaggttgacgactatgttaatgctgtgtgtgatgtggcaattagcagagcaaagaagagactggaagtagcataaggtaattagagagcttggaaacaggctctctttttatatattattttaataggaaaggaggaatgaccgtggcatacagattgtatatggatggcattttatttcccgttacgccgtccaagatcaccatgaaaatcaacggcaaaaatgaaacggtcacactgatcaatgagggggaagccaatattttaaaaagccccggtctgacggacgtggattttgagctgctgcttccggcggtgcagtacccgtttgcggtatacccgagcggattccgtccggcaaaatactatctggacaagctggaagcgctgatgagcgccaagagtgcatttcagtatgtggtcacgcgaacggatggaacgaatcagcgtttgtttgataccagcatgaaggtatcgattgaaagctacgacatcgtggaggacgcgggggaagggctggatgtaacggtaaaagtaaagctccggcagtaccgggaattcacaaccaaggcgtgtacgattgacatttcgcttccgaagccgagagctgcaatgcaggcagcaagagcggcatcatccaacgcgccgtccggcgggtcttacacagtgaaaaagggggattgcctgtggaagattgcaaagcagtattatgggaacggaagcaagtggggaacgatttacaatgccaataagtcggtgatcggcgggaatccgaatctgatctatccggggcaggtacttgccattccggcggcgtaggagggacatatgtacgagttattgatacagcatgatagcacggcgtatatgccgcctgtgaaagaagaagtgaaggttacgacggagcggcagatcagccccggagtgctcgaattcagctttgtggacactggaatcaacattggaaatggtgatccggttcggttcaaggatgcagatggaaaagaagtgttctatggattcatttttcgcatgaaacgcgatcgcagtaacattgtgacgattacggcatatgaccagatccggtatctgaagaataaggatacgctcgtatatgagaataagacggcggatggtgtggtggcgctgatcggtgagaagtatggatttaacatcggtacacttgccaatacggtgtgggtgatcgcgtcgcgggtggaagataatgtgtcgctgcttgatatgatcagtaatgccctggatcagacgttgcagaatacgggggacttgtacatcctgcatgacgattttggaaagctgaatttgtctttcctcggtgatatgtatgtgccggtcatgatcgatgcggaaactggccagaattatgactatgagtcttccatcgatgaaaatacctataaccggatcaaactggtttatgacaatgaggatgccgggaagcgggaggtttatatcgcacaggattcatccaatatcaacaggtgggggattttacagtattttgatgcgctgcaaaaaggagaaaacgggcaggcaaaggcggacgcgttattacagctttacaataaggagacgcggacgctgacagtcaaggatgccgccggagactcacgggtgcgcggtggatcgctcgtcgtggtgcagcttgatctcggtgacgtgaagcttcagaatctcatgttggtggaaaaatgcgttcacaagtacggcgagagcaaacacacaatggatttgacagtatcgggaggtgattttagtgcatgacgcaaatgattttgtccgggcggtgcagcaggtatcgacgaatgcgaatgatgccgggtatccggctacggtgatgtccgggacggtaacatcttccagccctttaaaaatcaaaatcgaacagagatttgagatcagcggaagcatgctgattctgccggaacatttgaaagaacgtgaaatcaaggtgacagtaaagccgacgcataccgaggacggcggtacgccggagcataaccatgaatatggcggcgaattaacggtgacggtacatagcggtctgagtattggtgacagcgtgcaggtggtccggcagcagggcgggcagaaatatcttgtaatcgggaaggtggtgtaagcatgataccggtatcaaaccagttgaaaaacgtcgaagtggtagaacagccgtccctctgtccgagaatgatcgtggaaagtgaacggatcatagggcagtgcgatgatgtcgaagctattaagcaggcgatctataacattctgaataccgagcggtatcagtatattattttttcgtgggactatggtgtggaacttaaggatctgttcggaaaaccaatcgattatgttatgccggaggtagagcggcgcatcacggaggctctggtgcaggatgacaggattgattcatgcgacagttttgagtttgagaaaaaaggaagaaaattgctggttacgttcgttgcacatacgaaatttggaagcgttccggcacagaaggaggtggatgtataagtgtacgaggagcagacgtttgatgcaattatgcagaggatgcttgagcgcatccctgatacgttggataagagagagagcagtcctgtatatatggcgcttgcaccggcggcggtcgaattggcatcgctgtatgttggatttgattgcatgctggcggagacattcggcgatacagcatcgcgggagtacctgatccggttatgtgcggataggggtatcacacccaagacagctacgtatgcggtactggaattagagacggatgtggaggtaccggtcggaacacggtttaccggcggggatcacttttataaggtaactgcaagcggacaggtaacctgtgagcagccgggggcagccgggaacgaatacctgggggatgttatcccggtggagtatgtgatggggctcacgacggcaaaacttacgcgtgtgttgatctacggagaggacgacgaggataccgaaactcttagattgcggtatcaggaatctttcaatgaacgggcttttgccgggaatgcaaaggactatcatgacaaaacactgggaatagcaggagttggcgctgttaaagtgatccgggcatggaatggtccgggaacggtcaagcttgtgattttagacagtgttttcggaaaggcaacggatgtattgattcagacggtgcagaaagaatttgacccgaataaagacgggcatggcgatggtcttgcaccgatcgggcacgcggtgacagttgacaccgtatccgaagtcactgttaatattgcggcgacgataacctatgataacgggtatgaccttaatacctgcaagacccagattgagacagccatagaggagtattttgccggacttagaaaaaactgggaaaatcagtcgaaactggttgtgcggattgcgtctattgatgcagcgatcatgggcgtgaagggtgtggtggatgtgaccggtacaacgcttaacggcgggggaaacgtcgaattaacagaatatgagatcccggtactgggggtggttacttatggctgatcgttatatcaatcttaaggaactgctccctttgtatttgcaggcgtataaggaacttgccgcacctatggatgcggaaacaccggagttccagataattgaggcggaacataacaggatcattgccaaccgttatatcgtgacctgcgatgaggagggcattgttcgatatgagcaactcatgggaatccagcccaaggcagatgatacgttggaagaccggattttcagatgcataacaaagtggaatgtgtgtctgccgtacaattatgctttcctcgatcaaaagttaagggaactatgcggagctgaatatacgctggatctggacattgccggccagaccgtaacggttaaggtgggacttgcgcagaagaatcagtatgatgtggtcgcggaaatgctggaagagatagttccatgcaacttacagttgaatctttctttactgtacaatcagtaccaggcgcttaaaccatatccacatattattctggcgcagtttacacattgggaattgcggaatttgagcatcccccggaatttgagtgctgcggtagagaatatagcggcgtatgcagtggatgatctggcacgcttcacagtggaagaggttgcggatataggaatcagaaagaaggtatgagatgaaacttacggatttattcaaattcaagctgtttgagagaaaagacgttgcagatctggcggtggtcaatgagaacttccagacggcggagagcgagattgacaagcggctgctcaaaactgcggtgcagaacacgaacacagtcacagaagcgggatatgcactggatgccagacaggcgaatccgaatgttaagggatcgctggcggaactgattgcggcgttgagcgaaatgttgacaagtcataaaagctctggcgatcatgatagcagatattatacaaaaacagatatgaatacgatgcttgccagaaaagctgatagcgagcacaaccatgacaaggtgtattatacaaaagcatttgttgatggtctgcttgcgttgaaagcagaccttacacattatcacgataacaggtactatactgaagcggagacggatgcaagaatggcaaaggcagctcgatatgtgggcttatatgaacaggagattacgttggcagcgggcggggaattttaccaggcaattccaagtacgtatcagaatggggggtatatttattttataaactgctcgggtaactcgttgaatttcacggccaacatggaaggatataatatggctgtgaagaataggggcgcaagtacgctggcaactcgagtgcaggtgtatttttttagcattggcgtataaatcaagaagaaagggaaaaagtatatgaagttgaaaacctcaaaagacacttacgaaattgtaagtgcaaaccatgaaaacggaaaattgaatattgtatttgaaaaccagtcctgcgaatctttgcaggatattttttcggtcaaaaatgatctggcacggctggagatttatgatcatgatgagcggaccagcattatcactgagtatgtggtgcttgaacgtgtggtgcttgaggataatcatgcgacggtagttctcggaagagaaagtgatgactattcgcagcgcgtcacggatctggcatcaaaacttgcggaagcatcggcaaccgcatcggagatggcggaaacagttaccgcgacaaataagacggttgatggaaatacaaccgatattcagaagcttgctgccgatatggattatctggctatgcagatggaggtgacattggatgagtaaacattatgaaaaggtaaaaggatattatgacaagaaactttggagcaaaacccgtgtgtacaatgcggtaggaaagtggatcacagccggggaatatgaggagatcactggggagacatatgaggaaccggcgaagaaaagtgccgaggaagatacaactatgatgtaggaggagaatcatgaaacagacggagaattatggctttaacgtgccggaggaacatgaattttatgatgttgcagcgcagaatgagaactgggagaagttagatgcggctttaacacaaatcgagagtcggctgcaggaaattgcagaagcaaaacagtaacagaaccatagtcatagcgtcgaacaattgatctttgtgatcgagcgtccggcgctattcagttggcacaaacctgcataagcagtgttttatacttataaggaaagagaggaaatgatatggaatcaatcatcacagcacttataacaggcgggctgacgctgatcggcacggtaatgacggtcagcagtggtcagaaaaagacggaccataaactcgagatggcgcaggcggttacggactgtaagctggacgagcttaccagagaggtaaggatgcacaacaacttcgcgcagcgtgtgccggtcatcgaggagcaggtaaaagttatcaatcaccgcattgcggacttagaggagggaaagtagtatgttgaaaaattgtgtactcagagtatcagtagacacgcagaaatgggcgaaagccgcgggcatcagagcgcttaagacgatggcacagactgcggttgcagtaatcggtaccggagcagtaatctcggcagtagattggaagatggtagtatcatccgcgattgtggcgggtgttgtgtcgctgctcacgtctgttgcaggaattccggaagtggagggataatttatggcgaacaaaagaattggacaggcaggacttgaccttatcaagcagtacgagggatgcagactggcagcataccggtgcgccgccggtgtatggaccatcgggtacggtcacacggcgggcgtacatagcggcatgacaatcacacaggcgcaggcggacgcnnnnnnnnnncaacaatcccgcatacgttccgatcacggagcagcttaaccagaatcagtttgatgcgctggccagctttgcctttaacttgggcgccggaaatctccggaagctttgcaaaggcagaacagcggcgcagatcgctagaactatgccgaattataacaaggcggcaggcaaggtgctggcaggattaaggcggcgccgggcggcggagcaggcattgtttaacaagccggtaagcgcggctacaccggcacagaatcagaatacggaggattacaacatgaagacgatcaaaaagggtagcaaaggcaacgcggtaaaggtatggcagatcatcatcggcgcggcggcggacggcatcttcggcagcggcacggaatcggcaaccaagacttggcagagcaatcacgggctggcggcggatggtattgtcggcaaaatgagttggaaagcgggactggaagcactgtaagagtatgaccggcgggagaaatcctgccggcttaataatatgtgatacttaaacacggtgtgttacattctaaaggcaatgaagcatagtaaaaaagccgattagcaattattcacaaaaagtaattggcaacgcattggtaacaaaaagttacgttttctcagtaaaatcaatgatttaaaattagccagagtataatttgaaatcagatttagcacttttaatgagaataaaaataccggtaaaccgtaatctggcttgccggtattttttgtgcatattattttgcggatgcagagcgggaagtgggatgtgtctggcgcagcagaattccgatggagaggagagccatgacggcctgactgatgagaagtccacacagatagccgcggatgccgtagacggggagggcaaacagcacaaagaggatgcggatgccgcaggcaatcagattcagcacgaaagtgatgcccgggtagccgagcccgtgcagaatactgctcagcgtcacgccgaggtataggaaaggacagatccagccgagcgtccgtataaatgttccggcgagcgcgttcccaaaaagcacattcccgataaagtgaccggtagcaagaaaacccgctgtacaaaaaaagccccacagaagacagacccggatggtttttaagaccgcgcgccgtatgagcgcatcgtttccgccggctttggcttctgagatggcgggcataagaagcaccgaaacggagttggtgatgacggacggaaacatgatgacggacatcgccatgccggttaagatgccgtagacgccaagcgcctcggaagccgtgtaaccgaacaggcgcaggcggctgggaatcatgatgttttcaaaactggaaaagagcgttaaaacaacccggtttgccgtgagcggaaccgccatggcaaggagattgcgcgtgccgcatttcacggaaagcgccgtgtccgttccctccggaagttttgcgacgctgacggagacgagcgtgcttgccacttcgcccatcacagctccccacattgtgacggagagcggaacggcggtctgctcccgcatatggatctgatagagcagccagaccgtgccgacacgggcgatctgctctgtgagctgtgtgagagcagggacgcccgtctttttctgtccatagtagcagccgttgatgcaggcgtggatacagcaagggacaaaggagagggagatgatcttaaggagcgggatgcaccgcacatctccgagcatggaaacaccgataaagtctgcgtatttccagattacaaagccggtcgcggcagataaaaacagcgacagcagcaggccgatccgaaaatagagcctcgcacccgcgggattgttctgcgcaagctcggaggagacgaagcgtgagatcgcagtctgaattccggcggcggtgacggcgaaaccgagcgccatcaccggggacagcagctggtagatcccaagaccttctgcaccaatcagccttgagaggaatattctatagaagaagccgataatccgtgtgagcacaccggcgagtgtgagcagcagtgtgccggtgatcagggaatttttcagagaatttccagaaacggaattcatgggaaaatgaatgtctggcaagtgtgtctccgggaattggaatctttttattatatgtaaggtgtgggggaaaaatgtgcgatcaggaatataaagcaggtgtggtctatctggataatgctgcaacgacgcggatggcggaggaagccgaagccgctatgcagccttatctggtggaaaagtttggcaatgcgtcaacgacttacggttacggggaggaagcgcaggcggcgattgcccatgcgagagaggtaattgcagcatcactggatgccagaccgtcggaaatctattttacatcggggggatcggaggcagacaactgggccatcaagggggtggcggaggcgtatggaaaatacggtcgtcatatcatcaccagcaggattgaacatcacgcggtcttaaactcctgccattatcttgaggagcagggctacgaggtgacttatctggacgtcgatcaaaacggaatgatctcgctggaacagttagagcatgccgtccgggaggatacgatcctgatctcggtcatgtttggaaacaatgaggtcggaacgatcgaaccggtcatgcagatcggaaggtttgcaagagaccatcagattctgtttcatacggatgcggtgcaggcgtatgcccagatcccgatctcgatgcagcagtatcacatcgatctgctgagtgcgagcgcccacaaatttcacggaccgaaaggcgtgggatttttgtatataagagacggggttacgatgccttcctttatccacggcggcagccaggagcgtggaaaacgcgcgggaacggagaatgtgccggggatcgtcgggatggggaaagcggtggaactggcattctgtaatatgcgcagaagaatccgcagggagatgatgctgcgcaattatctgattgaaaagatcatgcatgagatcaagggggtccgcctgaacggacatcccacgaaccgcctgccggggaatgtgaatgtgagcttttccggcgtggacggtgcatcgcttctcattctgctgtatgaggacggaatctgcgcctcgggtggctccgcctgcaacaccggggaggagcgggtctcctatgtaatcggggcgttgggcgtgccggacgaatatgcagcggggaccgtgcgcatgacgttgtcgggagagacgacaaggaaagagattgaccgcgccgtggaggctctcaagcagaatcttaggaaactgagagatgaaaaatagttttccctggggaaaaaatatgtgaaaatattacaaaaacgaaacgtacctttgcgggaaatgagaaagtgtgcacaagaataattatgcagtttgctttttgagagaaaatcgcaaaaagagattgcaaaaaacggcaaaaatcgggcacagaaatgagcagattgcccgtactttcaagtggtttaccggttgcgtcaaatttgacaaagaaaaaaaattatgcaataattgcgcggaaatcagagaaacacgtttggtttatagtaggaaaggatgaataatatgatagagagaaaaatcagattgtctgacacggaggaagtaaaggagtttgtgagagctgccggaaaatgtgattttgatatcgatgtttgttataacagagctgtgattgatgcaaaatcactgctcggaatgctgtatcttggactcagcaaggatctgaccgtaaaatacggcggacagaacaccgggtttgagaatacggtacagaaatatgcagtctgctagtcagacagacggagacagggctgctgccggagagaaacctcttcgtgcagcagccctgtttttgtgttacactgtatgataagaaaccggaaagtagggagcgctgccgtatggatgcacaacaggaaaaagacgaaaagaaaatcataaagatctcggtgcggaatctggtggagtttattctgcgggagggggacattgataaccgccacgggagaactgcgtccccggaagccatgtgggagggcagccgtatccataagcgcattcagaagagcaaaggcgcgaattaccatgcggaggtgccgcttaagatcgaacttagcgagggagattacacgcttgccatcgagggacgggcggacggaatcgagattacgtgcgacggggagagacagcttgatttttcggataactttaaccattttacggtggaggaaggcatgcatgtgacgattgatgagatcaaggggatctacatgaatctggatgcgctggatgaacctgtgggcgtgcaccgcgcgcaggcgatgtgctatgcctatatctatgccttgcagcatgatcttgcagagatctctgtgcagctgacctactgcaatctggatacaatcgaactgacaaagacggcgtttctggggaatctgaaatattttagggaaacattttcgtttgcggagctggcggagtggttcacccggctgaccgatgaatacaaaaagtgggcggattttcagttcgcctggcagaatctgcggcaggcttccatcaaaaagctggagtttccctatgcataccggaaaggacagaaagaactggcgtcggacgtataccgcacgattgcgcgccggaagaatctgtttatccaggcacccacaggcgtcgggaagaccatttcgacggtctttccggcggtgaaggcggtcggcgagggactcggggacaagattttttatctgacggcgaagacgatcacgggcacggtggcaaaggaagcatttgaacttttgcgcaccagggggtatcaggcgaagatcatccagctgacggcgaaggaaaagctgtgcctgtgcgaggaggtggactgcaatcctgtacactgtccctacgcgaaaggacactacgaccgcgtgaacgatgcggtgtacaatctgttgcagaaggaggatgtttttaccagggaagtgatcttagagcaggcgcgggagtaccgggtctgtccgtttgagatgtcgctggatacggcaacctgggcggatgatatcataggggattacaattatgtctttgacccgaatgtttatctgaagcgtttttttgcggaaggaacgcgcggggactacatttttctggtggatgaggcacacaatcttgtggagcggagccgggaaatgtacagcgcatcgatctataaggaggattttctggcagctaaaaagctgttgaaaccctatcaggaaaagcatgacagacgtgcggaacgtgtgatccggcatctggaaaaatgcaaccgcattctcctggggtacaagcgtgagtgcgaaaactatgtcgtatatgaaaatatcggtacgctgatctttgcactgacgcgccttgcggcagatctcgatgagtatttgcagaaaagtcccgatttcccggaacgcagggaagtaaatgaattttacttaaacctgcgcaatttcatgaatatctacgagctggtcgacgagcattatgtcgtgtattcagagcatgaggaggacgggcgcttcaagctgaagttttactgtgtggatccctccctcaatctgcaggagcgcattgacaagggaaatgcgacgatctttttctcggcgacgctgcttccgattcagtattataaaagcttgctgtccacccgcagggataattatgcggtctacgcgcagacggcgttttccgaggaacagcgcctgctgctgtttggaaatgacgtcagcagcaagtacacgaggcgtggcagggcagagtatgagcggattgcattatatatagaaaaaacagcgcgagcgaagcagggaaactatatggtgttctttccgtcctaccggatgatgcaggaagtctacgatgtgtttttagagggcggggagacggatgaaatgcgtccgcaggagtattttccggaaggagcagagaatgcagagattgtggagcatcccgaagaggcagagattgcggagcatcccgaagaggcagaaattgcggagcatcccaatgatgcggaaaattccggaaatgcagagccgcgtctctggggcatgatgcagcagaccgggatgcgtgaggcggagcgtgaggctttcttgcaggcattttccggtgaggcatcgaaacggcgcggcggttcactggtggcattctgtgtgctcggaggtattttcggagaggggattgatctgaaaaaagaacagctcatcggggcggtgatcgtgggaacaggactgccgcagatcagcaatgagcgcgagattttaatgcattattatgatgagagagcgggggcaggctttgattatgcgtaccgctttccgggaatgaacaaggtattgcaggcggccggacgcgtgatacggacgacagaggatgtgggagtgattgaactgctggacgagcggtttttaaagagtgattacagagggctgttcccaagggaatgggaacagcgccggatatgcaatgtaaatgaagtagaacagatgttagccgagttctgggagagacggcaggagctttaagaattcttccgtagactgtgcgattggaagcgtcgggttgactgcggtgaccatctggcgtgccgggagcttttccttgatctttacgataaagagctctttggactcgcggtttaggcagtaatccgggataaacgcgattcccaggccgatacgtgccagatcaatcagaagatcgttgctgctcagctcgatctgcggcatcagttcaagctggtgctgcagaaagaggttatgcaaaaattcgctggtggtgctcttgcggtcgagcatcaggattgggtactgctgcagatcctctaaggcaatctcctgctgcttcagattaaaataggcagggttggcgataaagacgtcgtgaaagctgcacacagtcttgcggatgtaggactggtttaaattagagttgggaaaattggtcacaatcagatcgacttttccctgctccaacagctccacacagctgagagaggttgagtttgtcactttgatcgggacattcgggaacttcttgtggaactgctttaaatacggcacgagaaaatagcggcagatggtgtcgctcgcgccgatgtgaagctgccccagaccgaggctgccggaatctaacagctggctctcaccgcgccggattaaattcatggcaggttcaatatgcttgagcagaatctttcctgccggagtcagctgtacttttttggtactccggataaaaagcggctgctccagctttttctccagcgtcttgattgactggctgacggcggattgggagatatagagctgcttgctcgcctcggaaaagctgagggaggttgcaacataatagaaaactttatacaattcgtaattgatatccatggttcctcgtttctgtcggagcgttgctccgaaccgttctgtagcgtgttaactataattataagacctgcttataaaactgtcaaataaatcttatgtgatatattaaccataataatagaagagattaaatatattaattatgcttatttgttcgcatatgctatacttcatatagaaagtaggataagatagaaatacaaacgatcagtagtttcgccgatggcgtgcgcagatggagggaaaatatgagcaacgtaagacgcgtatatgtggagaaaaaaccggcatttgctgtcagagcaagagagctggaagcagagatcagaaattatctcggtatcagtgacgtgaagggagtgcgtgagctgatccgttacgatatggagcatgtatcggaggaaacctaccgcaaggctctggttaccgttttttccgagccgccggtggacgatgtgtacgaggaaaattttgagttaaatggcgcgagaactttttccgtagaattcctgccgggacagtttgaccagagagcggactctgccgagcagtgtgtgaagctgttaaatgagaacgaggagccgctgatccgcacggctgtgacctatgtgatcgagggagagatcagtgatgcagagtttgaggcgatcaaaaagcactgcatcaacccggttgactccagagagaccggccttgagaagccgcagacgctggtgcagtcgttcccggagccagaggatgtaaagattttcgacggattttctgcgatgcctgaggcagaactgaaggaactttatgattccctcggtctggcgatgacattcaaggactttttacatattcagaattattttaaaaatgaggagaagcgcgatccgtccatgacggagatccgcgtattggacacctactggtctgatcactgccgtcatacgacgttttccacagaacttaaggacgtaagctttgacgacggctattaccgtgcgccgatggaagagacctatcaggattaccttgccacccataagaatctttacgcaggacgttcagacaaattcgtgtgcctgatggacattgccttaatggcgatgaagcgcctcaaaaaggaaggcaagctgatggatcaggaggaatccgatgagatcaatgcctgctcgattgtcgttccgatcgaggtggacggcgtgaccgaggagtggcttgtaaactttaagaacgagacacataaccacccgacagagattgagccgttcggtggtgctgcaacctgtctgggcggtgcgatccgtgacccgctttccggacgtacctatgtctatcaggcaatgcgtgtgaccggtgcggcagatccgacggtttccgtgaaagacacgatcccgggcaagcttccgcagaagaagctggtgcgcgaggcggcacacggttacagttcttatggtaaccagatcggtctggcaaccggttatgtcaaggaggtataccatccgaattatgtggcgaagcgcatggagatcggtgcagtgctcggtgcggctccgagacgtgcggtgcagagactgacctccgatccgggagatattatcattctgcttggcggccgtaccggtcgtgacggcatcggtggtgcgacaggttcttccaaggcacataacacagagtccaccgcagtctgcggtgcagaggtgcagaagggtaacccgccgacagagcgcaagatccagagattattccgccgcgaggaagtggcgcatattattaagaagtgtaatgacttcggtgcaggcggtgtatcggttgccatcggagagctggcagacggactgcgcgtgcagctggataaggtgccgaagaaatatgcgggacttgatggaaccgaacttgcaatctcagagtcccaggaacgtatggcggtcgtagtggcgccggaggatgtacagaagttccttgcatttgcgaaggaggagaatctggaagctgtcgaggttgcggttgtgaccgaggagccgcggctggtgcttatgtggagaggaaaggaagtcgtaaacttatcccgtgcattcctggataccaacggtgcacatcaggagaccaatgtggcagtggatatgccggacccgaaggaaaattatctgaataagatcgatacaccggcagtttccgaggcgttagcagcaggcgatatgaagaaagcatggctcgcagaacttgctgacttgaatgtgtgttctcagaagggactggtggagatgttcgacggttccatcggagcgggaagcgtatacatgccgttcggcgggaaatatcagctgaccgagacacagtccatggtggcaaagattccggtgatgaccggcaaatccgatgcggtcacgatgatggcgtacggtttcgatccgtatctgtcttcctggagcccgtatcacggtgcggtctatgcagtgcttgagtctctgtcgagaatcgtggctgccggcggcgattacagcaaggtgcgctttaccttccaggagtatttcagcagaatgagcgaggagccgaagcgctggagccagccgtttgccgcactgcttggcgcgtacaatgcacagatcggcttcgggctgccgtccatcggaggaaaggattccatgtccggaagcttcaacgagatcgacgtaccgccgacactggtatcctttgccgtggatgtagcaaaagagggcgacatcatcacgccggagcttaaggcagtgggaaatcagctggtacttttctccatcgagaaggattcttatgatcttccggtctatgcgcaggtaatgaagctctatgcggtgctgcatgagctgatcggaaagggtgcggtcgtatccgcctatgcgctggatggaaaaggacttgcggcggcagtcagcaagatggcatttggcaataagcttggtgtgacgattgagaaggaagtgtcggaagagacactgtttgcctcgggatttggtaatatcgtggcggaggttccggtggagaaggttggtattgtcaaggaggcattaaaggcagcgggactttccggaaatgaggagcttgtcggctgggtaaatgaggaacagagcttctgctacggcggcatgaagcttgcactcgacgaggcgatcgcagcatggagcggcacgctggagaaagtattcccgacccgcgtgacagataataaggacgaacttgacaccggcatctatcaggcagacagtatctatgtctgcaaacacaaggtggcaaaaccgaccgtgtttataccggtatttccgggaacgaactgcgagtacgacagtgcgagagcatttgagcgcgcaggtgcggacacgatcgtaaaggtattcaagaacctgaatgcagaggacatccgcgattcggttgaggagttcacaaaggcgatcgatcaggcacagattatcatgttcccgggcggattctccgcgggagatgagccggagggctccgcgaagttctttgcgaccgcgttccgcaatgcgaagatgacagaggcggtcatgaagcttttgaacgagcgcgacggactggcgctcggtatctgcaacggtttccaggcactgattaagctggggctggtaccgtacggagagatccgtccgcagaccgcagattcaccgacattaacctacaacacgatcggccgtcatatcagcaagatggtatacacgaaggttgtgacgaacaagtccccgtggctggcacaggcaaagaccggcgaggtatattgcaatccggcttcccacggcgagggacgttttgtcgctccgaaggaatggctggagaagctgtttgcaaacggtcaggtggcaacacagtatgtcaacgaggcgggtgttccgaccatggatgaggagtggaatgtcaacggctcctacatggcaatcgagggaatcacaagcccggacggaagagtgctcggcaagatggcacattcggagcgtcgtgaccggagtgtggcgatgaatatttacggtgagcaggatttgagactgtttgagtccggcgtggaatattttaagtaaaagaaaaaataacgggaagtaaaagagaccctgcagcgaggagaaaaacctttctgcggggtcttttgccgttcggttcttgggggattgttgataaaacaacgcaaaatgagtataatagtgcgaaagggaacggaaaacgggaagaagaaagatggagaaacgtatgaatattttagtgctgggcggaacgggatttttcggaaaacatctggtgtgggaacttttgcaccggggacatgaggtgacgatcgcaacacgcggccggacgccggatgattttggagacagagtcagacgtctgatcgtcgaccggacggatgtccggcagatggagcaggtgtttgcccataaatattatgacgttttctacgacgatctggcttactgtgcgggggatgtgcgcaccgtgctggaggcggtgccctgcagaaggtatgtgatggtgtcctcggcatccgtgtatgatctgcattttcagaccgtggagacggactatgagccggaacatgacagactggtctggtatacggattacagcggatcgtatgacgtattgaagaaaagtgcggaatgtgcgctcgtgcagcagtatccgatgaaaaatgcggcttttgtgagattcccctacgtcatcggcagggatgactacacggaccggctgtacttttatgtggaacatgtggtgcggcagaaaccgatgtatattgataatatggacgcacagatgagctttatcagcgtggacgatgcggggcgccttctggcgcatctcggcggggatgagatccagggtgccgtcaacggagcgagccgcgggaccatctcgccgcgggagatcctgacttacgtgtacagacgcaccggaaaagaggcgtttcttgatgagaccggcgatccggcgccatataatgggacgcccggctacagcatcaatacagagcgcgccgggcgtacgggatttgtgttttccaatctgaaagactggatctatgaactgcttgatttttacatagagcgcgccgcagaagagatgcgtaaataaaaacaggacatcaacgtataaaatgtcagtgagaatgaggactggagcgccggatgcggcggtcagtcctcaatttttatgaattccggcttgcgtttccggaagaccgtgtagtaaataaaaccggcgtcctttaaaatctgaggcactttctcaaaggcaaagccgacatgttccggggcatgggcatccgcgccgaccgtgatgatctcaccgccaagctcacggtagcgcgcgaggatctcctcgcaggggttcggatgtcccagtccgtatttgaagccgccggtattgatctcgatgcctttccctttttcaatcagaagtcttagaatctcgtcgatcacgtcgctgtatctggcgtaggtataattctcgttgcgcgtcggaccgtagcgcacgacatagtcgatgtgaccgtagacgtcaaagtcatcaaatgcccggatgttttccaggatggactcaaagtattcgcggtatccttcctcctcggtgtgtgtcttccagaatggcggaaaatacggatcatagccgtgtaccacatgggaggaaccgatgacaaagtcgaagtcatactgcgagagaatatcggcatgcagcgctgccagatgcggctggagccccagctcgatgccgtagcgcacgctgatctgatcccggtactgttcctgcatggcgaaaacggatgacgtgtagttcggcaggtctaacaggaacgcttccgggttgtccggatagtcgatgtccagatgatccgtaaaacagatgccggggagctttgccctgattgcagcgcggatcatgtcctcctgcggggcgtcgctgtcaccggaatattggctgtgcatatgtgtatcccataacatagagatcttcctttctgtgtgagtttaatggatcagttcgttgaaaaattccgggaaccctacgcggaactgtttctcgcggatcacatatctgcggttatctgtgtgcagggtaagcgtccggagcccctgactgccggaggtacattcaagctggcggatatcccggcgcagcagggtttgtgtccggcgggggaaacgggaaataacaattttttcgcggtcgtaggtgattttctgcagactgacataaaacagtgccagaacggtgccgacaaacgcgaccggaaagaaaagggcgccgtagagcttttcttcgcggatgatctgcagcgttcccgaaatgctttccccggaaaaaacggtcaagccgaaaaacagaaacatgacaaccgcatagaggatgaggagcgcgtaatattcgccggtccggtagcgcagtgttccgcagccggatgccgcagacaccggattgtcgtacggggtgcttttttgctttgcggtgtattcgggacgggtgaaccgtaacgatgcctgataaaattgccggtagccttccagattcgcatttgcgctgacgcagcggcggccgtttctgtcatacagatcaaaaaagtcctgatttttgatccgcatctcagagatttcataccagtgaatggtctggtaggggcggaacggtttcccgatcagaaggatttcttcattatatagaacatgacgtgcctgcatggcgtaaccgccgagaaagcagacgacaactaacaggatggtgatgccgatgcatgagagcagagagcctatatccgatgcctcaaaaccgatgtcctgatacataagcaccataaaaaatgtgacgatacacgcgcagagacagcccagggcagggagcagcaggaccctgccgcgggaagtggcaagcagctgcatgccggaactctcataatcccgctggctgcggcttttgcgaaacagcggcgtcgcggataatataagaacaaaaacaaacaaaatcagtaaaaaaataaggtctgacataagaaaactcctctttggtatgtttacaggttaccagaaaaaagtataacacagcgggcgtgcagcgtcagcagattttccggcgtattttcagattttgtatatttttccggaaaagggaaaaaaaacctgtgatatagtgaaaaatttaacaaagtggcaataaagtggagaaaaaggcttgaactttctatggaaattggttagaatataggaagcacggagccaataagcataagtaccttgtgcttgccggttccaggggatttatgcccggcgattacatttacaaattctaggaggaattaaaaatggcagtaagagtagcaatcaatggttttggccgtatcggtcgtcttgctttcagacagatgtttggagcagaaggatatgaagtagtagcaatcaacgatctgacaagcccgaagatgttagcacacctgttaaagtatgactcatctcagggtaagtacgagcatgcagatgaggtatcttctacagacgattccatcatcgtatgcggcaaggagatcaagatctacgcattcccggatgcaaataactgcccatggggagagttaaaagtagacgttgtattagagtgctccggtttctacacatccaaggagaaggctcaggctcatatcaacgcaggcgctagaaaagttgttatctctgctccagcaggaaatgaccttcctactatcgtatacaacaccaaccacaagacattaaaggcttctgataccatcatttccgcagcttcctgtacaacaaactgcttggcaccgatggcagacgctcttaacaaatacgctccgatccagtccggtatcatggtaaccatccatgcttatacaggagatcagatgactcttgacggaccgcagagaaagggtgacttaagaagatcccgtgcagcagcagtcaacatcgttccgaacagcacaggtgctgcaaaggcaatcggtcttgttattccggagttaaacggcaaactgatcggttctgcacagcgtgtaccgaccccgacaggttctaccacaatcttaacagcagttgttaagaaagccggcgttacaaaggaagacatcaacgcagctatgaaggcagcagcaaacgagtccttcggttacaacgaggatgagatcgtatcttctgatatcgttggtatgagatttggttccttattcgatgcaactcagaccatggtaaatcaggtatctgatgatcagtatgaggttcaggttgtttcatggtatgacaacgagaactcctacacatctcagatggtaagaaccatcaaatacttctccgagttagcataattgagagaaagagattgttctcggacaatcacgtgatagactcagaaaggggtccggtcttttatggaccgggtccctttttgacattttgcatattaaagggggacatggcatatgtcattaaacaaaaaatccgtagatgatatcaatgtaaaaggcaagagagtgctcgtaagatgcgatttcaacgtaccgctcaagaatggcgagatcacagatgagacccgtatcgtggctgcacttccgacaatccagaagctgatcaacgatggcggcaaggttatcctctgctcccatcttggaaaagtaaagaacggaccaaacgagggcgagtccttagcaccggttgcaaagagactttccgagaagcttggcaaggaagttgtatttgtatctgattacaacgtaaccggagaggcagctaccaaggcggtagaggctatgaaagagggagatgttgtattacttcagaatacacgtttccgcggcgaggaagagaccaagaacggcgagcagttcagcaaagagttagcagatcttgcagatgattacgtatgcgacgcattcggttcttcccacagagcacatgcttccgtagcaggcgtgacaaagttcatcagcgcaaagggcggctccaacgttgtcggctacctgatggagaaagagattgcattccttggcaatgcagttgagaatccggtaagaccgtttgttgcaatccttggcggtgcaaaagttgcagacaagttaaacgttatctccaacctgcttgagaagtgtgataccttgatcatcggtggcggtatggcttacactttcttaaaggcacagggttatgagatcggtaaatccttagtggacgacagcaagatcgactactgcaaggagatgatggcaaaggctgagaagcttggcaagaagctgttacttccggtagacgcagtgacaatcgctgatttcccgaacccgatcgacgctccggttgaggttgaggtttgcgacgttaagaatatgccggctgacagagagggctgtgatatcggaccgaagacggctgagttatatgcagaggctgttaagacagcaaagaccgttgtatggaacggaccgatgggtgtattcgagaatccgacacttgcaaaaggtacgatcgctgtagcaaaggcactggctgagacagacgctaccacaatcatcggcggcggcgattccgcagcagcagtaaaccagcttggttttgcagacaagatgagccatatttccacaggtggcggcgcatccttagagttcttagagggtaaggaacttccgggtgttgtagcagcagacgacaaataaataacaaaatcctgctgtcgtgacggtacaaaacgtcgtggcagcagatacataaatgggatcattcttaagggaaagaggattttaaaatggcaagaaagaaaattgtggccggcaactggaagatgaacatgactccaagccaggcagtaaagttagtagaagagttaaagccgcttgtagtaagtgatgatgttgaagttgtatactgtgttccggcaatcgatatcgtaccggttgtagaggcagtcaaaggtactaacgttgcagtcggtgcagagaatatgtactacgaggagaaaggtgcctacacaggagagatctctccggagatgctggtagacgcaggcgtgaagtatgttatcatcggtcattccgagagacgtgactacttcaaagagtgcgactgcatgctgaacaagaaagttaagaaagcattcgagcacaatctgaccccgatcctttgctgcggagagacattagagcagagagagatgggcgttactcttgactggatccgtcttcagatcaaatcggacttaaaggatattaccgcagagcaggttgcttccatggtaatcgcatatgagccgatctgggcaatcggaaccggcaagacagcaacaaccgcacaggcacaggaagtctgcaaggcaatccgcgactgcatcgctgaggtatatgataccgatacagctgagaaggttcgtatccagtacggcggatctgtcaatgcaggaaatgcggcagaactgttcgcacagccggatatcgatggcggtcttgtaggcggcgcatccttaaaggctgactttggaaagattgtaaactataagtaatagtttaaaattacagggaatcaggatcgctgcggagcggtacgatcctggaacggggacccgcttctctctgcggtaacaggcggagagagacgggttttcgtgaaaatttgtaagtggtaatataagagaattttgagtgacagcggagaaaatgtatgcccaaaaagtgcaagggaaaaagaaatgcacttgtagtaaccgtggtggctgtacttctgggagatatttttgcaggaggacagaatattccggcacaacagaagacctggaatgccggagatacaaaacgtacgcagatgacagagagcgcaacacagagaatggacctgacagacgcatttgcagtgatattacaaggtgcgacgaagaaatttatcgcaggatatgcagtcgatgattcgtttttgatgtggctggctgccagatacggagatgagaaggtagtgcggatcgcgagtgccgttctggatggaacggaggatccggaagtctggtatgacattaccggcagctccatccatgtactgtggctgatgtattgcagggacagtggttttcagcagtaccggctgcaaaatgtatactggaaagaggccggagaggatggaaagatcgtgctcggctttgcgggtgacatcaattttgccgacgactggtatacgatggagtatatgaaccggcagacgaatggcatctatgactgcttttcggaggatctgctctcggagatgcagaacgtggatgtgatggtgatgaacaatgagttcacctacgcagagagcgggagcgtggaggcggttcccgggaaggcatatacctttcgggcagatccggaggatgtagaactcctctctgtttttggaacggatgctgtgacgcttgccaacaatcatgtgtatgattacggggaagaaggactgctgtcgaccttagattgtctgcggaaagcggacatcccttatacgggggcgggcgagaatcgaaaagaggcatccaagatcctctcttttgtgatcggaggcagaaagattgccattgtttccgccacacagattgagcgggcgaccaagtatacaaaagaggcgacggagacggaaccgggagtattaaagaccttgaatcctgccgcatttctggaggtgatccgggaagcggacgccacaagtgattatgtgattgtggaagtgcactggggaacggaaggcagtctgcacgaagaaaaatcccagcgtcttctggcggagctatatgcggaggcaggcgcagacgcggtgatcggcggacatccgcaccggctgcagggatgtggttttaccgatggtgtgccggttgcgtacagtctcggaaatttctggttttccaccgggacgctgtatacaacgcttgccaagattacgatcacagaggacggcgcggtgacactttcctatgtcccgtgtatacagaagggactagttacaagcattctgacagagcaggatgataaagacgggttttatcattacctggctgcaatttccgatgacatcggaatggatgcggacggtaatgtttatgataaaacagcgggggattatccttcgcaggtaatcgtgtacgattcggatacaagcaagacaaagatccgcggcacgacagataatgatgggtatgccatcgacattgttggcaaccgaaaataaagagagagggaagaacaatgagtaaaaaaccaacagtactgatgatcctggatggattcggattaaacgataagacggaaggaaatgccgttgcacaggcgaagaagccgaatatcgacgcactgatgaaggaatatccatttgtaaagggaaatgccagcggactggcagtaggtcttccggacggacagatgggtaactccgaggtaggacacttaaatatgggcgccggcagaattgtataccaggagctgacacgcattaccaaagagatcaatgacggcgaatttttcagcaatcaggcgctgcttgacggtattgcaaatgtgaaggagaacaattctgatctgcatttatacggacttctttcggatggtggtgtacacagccatattacacatctgtatggtctgctcgagcttgccaagagacagggcgtaaagaatgtatacgtacactgcttcctggacggacgtgacacggctccgacttccggtaagggatttatcgaggcactggaagcaaagatggcagaactgggcatcggtaagattgcttctatttccggacgctattatgcgatggaccgtgataaccgctgggatcgtgtgcagaaggcatatgatgtgctgaccaagggcgagggagagaccgcagagagcgctgttgctgcaatggaagcttcctacgcaaaggatgtgacggatgagttcttcgtaccgaccgcgattaccgagaacggcaagccggtagcgacgatcaaggacaaagataccgtgatcttcttcaacttccgcccggatcgcgcacgtgagatcacaagaaccttctgtgccgatgaatttgacggatttgacagaggcgcgagaaagaatgtgaaatatatctgctttaccgagtatgatgtgacgatcccgaacaaggaagttgctttcaagaaagtggagcttaagaacacatttggcgagtatctggcagcgcacggcatgacacaggcaagaatcgccgagacagagaagtatgcgcacgtcacattcttcttcaacggcggcgttgaggagccgaacgttggtgaggaccgtatccttgtgaagtctccgaaggtggctacctacgatctgcagccggagatgagcgcaccggaagtgtgtgagaagctttgtgcagctatccgttccgaaaagtatgatgtcattgtcatcaactttgctaacccggatatggttggacataccggtatcattccagcagccatcaaggcaatcgagaccgtagatacctgcgttggaaaggcagtggaggcattaaaggaagtagacggacagatgttcatctgtgcagaccacggaaatgcagagcagatggtggattacgagacaggtgcaccgtttaccgcacatacgacgaatccggtaccgtttattctggtcaatgcagatccgtcctacacactcagagagaacggatgcctggcagatattatcccgacgttaatcgaactgatgggaatggagcagccggcagagatgacaggaaagtcacttctggtcagaaaataaagaatagaacgagaaaagcagtcccgggggaggggctgcttttcttgtgttaggattcagaaaacggggggaccgttttctggaacatctgccctggtggcagataaagaggagttatatgaaattagataattgcaaaagtagtgcttttgtcctatctacgcagttattataactctggtactaaagtacgtcaagggagaaacatgtattttttttaagacaaaatatgaattaggctgtgtgaacaagcctataagtcacgctaatgaaataatgaatatgtacaaaaatactaataaaaagaacccgattttctatatcgcagaaatggtgtgagcgggtaaaaacattgactttccaaaagcggctgtattataattttgaagtacagtgcagaaatagtctgcggaagtgggtaaagctgtaaatatcaacaaaagaagccgggaaggcttcggaaaagaggatgaaatgcaggaatttaagccggtaaaagagggaaaagtacgtgaggtatatgataatggagacagtctgattattgtagccacagacagaatctcagcttttgatcatattttaaagaataagatcacaaagaagggcgcaattcttacccagatgtcgaagttctggttcgattacaccaaagatatcgtgccgaaccacatgatttccgtggacgtaaaggatatgccggaatttttccggcaggaacgttttgagggaaacagcatgatgtgccggaagcttgagatgcttccgatcgagtgcatcgtgcgcggatatattacaggaagcggctgggcaagctatcaggagaacggcaccgtatgcggtattaaactgccggaaggactggtagagtccgacaagctgccggagccgatctacacaccgagcacaaaggctgagatcggtctgcatgatgagaacatctcctttgaggaaagcgtgaaagtgctggagaagatctacccgggcaaaggtgcggattacgcagcacagattaaggacaagacgattgctctctacaaaaagtgtgcagagtatgcattaagcaagggcatcattatcgcagatacaaaattcgagttcggtctggatgagaacggcaacgttgttctgggtgacgagatgctgacaccggacagttccagattctggccgttagagggatatgaagccggaaaaggtcagccttcctttgacaagcagtttgtcagagactggttaaaggcaaatccggacaacgatctgcttctgccggaggaggtggtagagaagaccgtggccaagtacaaggaggcatttgagcttcttaccggaaagccgtttcaggcataaaaagacagaatatcagattcgtagatggggaaatcaatgagcgataatagaatcaataaaaatcagccggtgggggatgaactgcatgaggagtgcggcgtcttcggaatgtacgattttgacggcggagatgtggcatccacaatatattacggactgtttgcattgcagcaccgcggacaggagagctgcggtattgcagtcagcgagacgaacggtccgaaagggaaagtgacctcctacaagggaatgggactggtcaatgaggtttttaccgaggagaatttagagcccatgcacggggatatcggcgtggggcatgtgcgctattcgacagccggtgcgtcgaccagagaaaacgcacagccgttggtgctcaactatgtcaagggaactctggcgctggcgcacaacggtaacctgatcaatgcggcggaactcagacatgatttggagtatacaggagctattttccagaccactattgactcggaggtgattgcctaccatatcgcaagggagcgtctgaaatccagtacggtggaggaagcagtggggcgtgcctgtcgcaagatcaagggagcgtattcccttgtggtcatgagcccgagaaagctggtcggagcaagggatccctatggttttaagccgctttgtatcggaaagcgcgataatgcctatatccttgcatcggagacctgcgcactcgatacgatcggcgcggagtatgtgcgtgacgtgctgccgggagagacggtgacgatcacgccggagaatggaattgtctcggatctgtcccgcgcactgccaaaggagcaggaagcgagatgcattttcgagtacatatattttgcaagaccggacagtcatatcgacggcgtgagcgtatatgcatcccgcatcaaggcaggacggttcctggcgatggattcgccggtggatgcggatcttgtggtgggtgtgccggagtccggcaatgccgctgcgctcggttattcgctgcagtctggcatcccgtacggaaccgcttttgtcaaaaacggctatgtgggacgtacgtttatcaagccgaagcagagcagccgtgagtccagcgtccgcgtgaagctgaacgtcttaaaagaggcggtggacggcaagcgcattatcatgatcgatgactcgattgtgcgcggaaccacatccgaccgcattgtaaaaatgctgcgggacgccggagcgacagaggtgcatgtccgcatcagctcgccgccgtttttgtggccgtgctattttggtacggatattccggagcgggaacagctgatcgcgtacaaccgtacgatcgaggagatccgggacatcatcggagcagattccctcggttatcttggaattgaccgtctgagtgagatggcagacggactgccgatctgcaagggatgttttaacggtatttacccgatggagccgccgaaggaagatatccggggagactacgagaggtaaaaagcttcttgaaaatatagaagaatgtggcaggcagcagaaaagtttagattcgagggaaatgcagcaagcagcaggagcgccgggaacaaggggaaatgcagcaggtggcagaacatcttgaattaaaaaatgcagcaagcttaaggatagaggtaaggagaaaaaatgagtacagacagatattcaagtccgctttcagagcggtatgcaagcaaagagatgcagtatattttttcacaggatatgaagttctccacatggagaaagctgtggattgcacttgccgagacagagatggagctgggactttctgagaacggaaagccggtcatcacacaggaacagatcgacgagatgaaggagcatgtgtacgacatcaattatgatgtggcaaaagagcgcgaaaaactggtgcgtcatgatgtcatgagccatgtatacgcgttcggacagcagtgcccgaaggccgcaggcatcatccatctgggagcgacttcctgctacgtgggcgacaatacggatattattatcatgaacgaggcgttaaagctggtgcacaagaagctggtcaatgtcattgcggaactggcaaagtttgcggatacttacaagaatctgccgacgctcgcatttacgcatttccagccggcacagccgacaacggttggcaagcgcgccacactctggacacaggagtttttgatggatctcgaggatctggaatatgtgatgagcaccttaaagctgcttggatccaagggaacgaccggtacgcaggcaagctttttggagctgtttgacggggatcaggagaccatcgataagattgacccgatgatcgcagcgaagatgggattcaaggagtgctatgcggtatccggacagacatattccagaaaagtggataccagagtggcaaatatccttgccggcattgcagcaagtgcacacaagatgtccaacgatatccgtctgctgcagcacttaaaagaagtggaagagccgtttgagaagaaccagatcggttcctccgcaatggcgtacaagcgcaacccgatgcgttcagagcgtatcgcgtctctttcccgctatgtgatgatcgatgcgttaaatccggcgatcacctctgcaacccagtggtttgagcgtacattggacgactctgccaataagcgtctttctattccggaaggatttctggcgatcgacggaatcctggatctgtgcttaaatgttgtcgacggtctggtggtctatgacaaggttatcacaaagcatatgatggcagaactgccgtttatggcaacggaaaatattatgatggacgcggtaaagaacggcggcaaccgtcaggagctgcatgagaagatccgccagctgtccatgcaggcaggaaagaatgtcaaggaagagggtaaggacaacaatctgctggagctgattgcggcagatccggagttcaatctgacgttagagcagctgcaggcaaccatggagccgtccaagtatgtcggacgcgcaccggtacaggtggatgcattccttgcaaacgttgtaaatccggtattggagaagaatcaagacgaactcggcgtaaaggcggagatcaacgtataatagagaagtggctaaaaaacaggcgaagcaccgtggtgctttggcctgtttttttatggaactgtcccaataagcatatcatgtttgctttgataagtaatattatcagaaacacacttcgggatttcatgtggaaatgcagatggaaattcggttcaaaaaatgtggaatttctaaccagccgaatgtttgcatcttcgatgatccatgtctttccaagtttggagcactccacggactgtgtccgcaaatcatgagacaatttaagaactttcgtgtggcgcttttgccgctgctgaataaaacataatcgcgcgaagccgatgtctgagttgccatctgccttattttcaatagcagatggcagcgagtttcggttcgcgcgattttatagtgtctgtgaggcagcggcattagccgccactagaaagttcgctcattgtctctgatttggcggacacactccgggagtgttcaaacgtggaagagacacggaatccgatgcaaacattcggctggaagaaatactcacatttttctcaaccgaatttccatctgcatttccatctgagatcccacgatgtggtcttctttctgataatattacttatcaacccaaagagatctatgcttattgcgacaattccacaaaaaaggcgcttccgattaacggtaatcgcccatataaaacagtgcaacgacgcccggacccgtgtgtgcgccgatggtcggaccgacatggttgatcagaaagctttcatagccgaaacggtctttgatgagatcagcaacatactgtgcatcttcgatgcagtcgccgtggctgatgaaaatgatgtcattcttgtcacgccagctgccgatctgtttttccatggcatccacgagagcaatcagcgactttttgcgtcctcgcactttggagagcggaatcagatgtccctcatcatccacatgaagaagtggttttaaactgatcattgtaccgagaaaagcagcggtttttgacacgcggccgccgcggtagagatgaaacagatcattgacggtgaaattatgtacaaggtgaagtttgtttgactcaagccagtctgcggtctcttccagtgtatgtccctgctcctttaaggtgacggctttgtgcaccagaagtccctcgccgagagaagcgcagagagaatcgatgacgatgattttccggtcggggtatttttcggaaagctcctccgccgcgagccttgcgctgttgtagcttccgcttaaaccggaagaaaaggcgatatgaagaatatcggcattctgttcgttgattattttttcaaaaacagcggcagcctcctcgggattggcctgggaggtcgtgggaagagaaccctgacgcatgcagtcataaaattcctttaccggaagcggatgctcccaagaataagtagtatcgttaatcgtatatgtaagagaaagcatgccgatctgatgctgttctacataggcagccggaagatcggatgtggtatcggttgtaatgataaaattattcataagacctcctgatacatgtatttgtatttattataatggaagcaatgcgaaaagaaaagtttccggtagtaatttctaaaaaaaatataaatttgaaaaatgctatttacatatgtaagaaaacgatgtaaaataagcacatcttttatcaaatagttggattttatccacatttctaagtatcacgctatatggaggcagtttcatccataattccagtaaggacaatcacacagcacagagtgaagtgaggaacaaatgaatattgtattttggggagaaacacaccggagcggtacgacggcgaactatactgcaatggcaagcattttgccgcacttatgcccggacaggaagattgtgtgcggcagcctgcagagggagcgatgcgaggattcggcactctttttgtgggatgcgggagtgtgcagtccggcgggtcaaaagaagctccttttgacagcggatcttgtggtggtaaattttgaaccgcaggattacgacggaatggagcagttctttttgcgccatatgtatctggagaagcgcatggtgtatctgtatgccaactgcatcgggacaccggagccggatgtgctaaacagagtatatcgggtggatgagggacagattggcatcgtgcggtacaatgcagcgtatgactgtgcattgaagcgcgggctgggcagctcttttatagcggaggaatacgggtctgcgagaagcggcaggaatcaggagtttatcgacggattagtaaaagcggcggatcgtattttaagggatgtatgtaagatcgataaaaccggacatgtttggtaaaagaaaaagacacaacagaagggtgaaggaggaaattattatggaacaggtaatgaaacattatggaaatgcaatccttgcaattattgtattgcttgcactcggcgcaatcattattgcggcgctctcctcggacggatatgtggcgacggagttcaagaatgcgctgacgggattcttttcccgcatgaatggcttaacgccatagggaggatgacatgggggagatcatgacgtttgaaccaacggaagcgcagtttggggttttctggaaatatctgcaacgcccgaatgttaccgatgtggactacaacggaagcgaattgtggattacggacttaaagatcggaaggtatcgtgtaaaagagcatctgtccgatgcatttatcagcacttttacgcacaatatttccaactgcgtgaatcgtcagttcaataatgccaataaggtgctggaggctgataccagagaactgcgtatcagtattatccatgaggcggcggccgcatccggcaccagtatctgtatccggaagtcgccgagcatggtgcgcatgaacattgagagaatgctggaagaatcctattgcccggaacggattttacagcttttgatgaactgtgtgctggcgggcatgaattttgtgttcggaggagaacccggtgcgggaaagacggagtgtgcgaaattctttatgcagtttataccgcgcgaggagcgggtaattacgattgaggattcgctcgagatccattaccgggacatcaatccgggggcggatgcggtggagcttcgtgtcggagaagatttttcctacacggatgccatcaaggcgagcctgcggcagaatccgaagtggcttgtcctctcggaggcaaggtcggtggaggtgacgtcgctgctcgagcagtggagtaccggcgtgagcggctttacgacgatccacctggatgatgtcagaaagcttccggaccgcattcagaatatgatgagcgatgcgcgtgacgcagagcgtatggagaaccggatctaccgctatgtgaatgtggggattctgatccgctgcgtcagacagccggacggaaagatccgaagatatatggatcagctgtgtttttacggcagggagcagtatgagaatcgtatttatatgatactggaggatggggaactgctctcggaagagctaccgcctgcgattgtgagacgccttggacaggcgggaatagaggatccgttttgctgcgcacactggcagagatacaggagagagggaaaatagatgaaaagagaaggactgtgggagaaactgcggctgttgaatccgaaaaatttgcagcgcgaagtgcatgtgtacggttatcgtttttcgtggaggacgcatcttatggcggtgatagccgctctggttggaatcggtgggattggaatggtgtttcagctaaaaccgctgtttttggcaggggtgcttttgacagtgcttttcgtattcccggtactggtacttgacatgtataagaaaatgtatgagcagaagcgttttggagatgcatgtgcctacatggaacagctgctctatgcgtttcagaagaccggaaagattgtgagtgcattgaaggaggtgcgcggaatttttggggaagggcagatccgactctgcgtggaggaagcgattgcgcatatggagtacgggcatccggtcggagagcagggcgttctgcgtgagggtttacagaaaatcgaacggtattatgcctgtgataagctggcgacggtacatgaacttctactgaatgcggaggaatatggcggggatgtggaggcatcggtcacgcttgttctggaggatattgagcggttcaaaaagcgtggataccagcttcaggcagagaagcggaagagtcatacggataatgtgatttctattgtggtggcagttcttttgtgcgcggcggcattgtatcttttgaatgagatgcaggagatgtttacatcagaggctggcgtatcggtgtttaccgttcctgtgatccagatatcttcgatggtgtttcttctgctactgcttgcattttatgtgaagagtgtcagaagcctgacggctgactggctggaggaaaagccgctgtatgacacggcatatatcagacacagctatgaactggtaatggggtatgaaaagaaagcacagcagtatcggcgcctgattcctgcaggaattgtgactatgactgcgtttgtgctttggactgtgggatggcgcattacgggaatactcctgctggtgactggtttactggttgcaatgcagccgagaatcagttaccgcattgccgagcgggacgtgacggcggaattgtatcaggtgctgccgcgctggctttttgagatggtattacttttacagaacaataacgttcagatggcgattacaaaatctgcacaacatgccccggcggtgctcgggagcgaacttgcggagctttgcgcgagaatggacgagcgtccggatcaattacagacatacacggacttttgcaaaaagtttgatctccccgagatgttaagctgtatgaaaatgctgcatgctttttctgaaaacggaacaggagatattgatgtgcagatgaatcatctgattgagcgtgtggttctgatgcaggagcgcgccgatgttttgcgcagtgaagaacgtgcattccggatgaagctgatttttgcatatccggtgctggcagccactggaaaactgctggcagatcttacggtcggaatggcgttgatgatgcaggttcttggaggcatgggaggtgcgtgagtgaaatatatcatagaagtattcagtgtgatgctggtgctggtttttaatctgctgctgtgcgtcagtatgctcggggtgagtgccgatgtggcagcggcgaaggaatttaaagctgcaatgattgcagaaattgagaacagtgactttaatccgtacgtgattgatggctgcaaggcgcaggcaggaacagaagggtatgaactggaagtgcagtcctacacctacggtggacaaagcgaccgcaggattgcggggatcaatctctattatagataccggataccactgttaggggtctcgcagcagcgggtgacgagaggaatcgcacggtaaaaggaggagcaggatgcaatggagtctggaagaacttggaatgacaatgctggtattgctggtgggctggtttggatgcacggcaattcaggagatatggatgcaggtggctggcatgctatagggggatttcgtgtccggacgtgtcagagaaaaggagcgtacagatgaaagagatcgcagaggtttatggcaatggatttttgcagattgcaggcggaataggggcattgctcttattcttccatgccgtggatgggcaggggatgatcggtatggtcctgcagtattatatgacgggaatctgtgggagttaagtgtccaacaggaaaagaacagaggtgatcagatggagcaggtacttcaatgctatggaaagggaattgcggcaggaattgtgttgataacagtcatggtactgctgtttgcaggaattcgtgacgagcagggcaaccggggaattattaacatcgtaaagacatggataccggaggaagagacaatcacagaaaacgctgccatcgacgcttttgcggaggcgggggaggtggcgtaccccacgatccggtatgcgtacaatggtatgctgcacaggggagcatatctgccgggagacttattttctgcggtagacggaatgggagaagaacggagtgttttgtggtgtgagatgacagatccgcatggaaacagctgcacaatagaatcacagcaaggtgatgttgtgtttgatgtggaggggatctatacagtgcgggtctgcgcgacagacgaagcaaaccgcagaagcgtctgtgagtttcagatacccgtgaaccgatgagaagacagaaagccgggaaaggagatatatgtgaaaaatgcagcgatgatcattgtcagtgcaatcatgggatttctgatactcgggattgtgctgacaattggcggaagcatgaaccgcagatgtgaggtggagacgattcttccttccgcaatggaaaagacggtcgaggggatgccgtttgcggaggcggggtgttcttccggagaattggtgattgcggagtgtgtggaacttctggcggcggaaatcgatacagactctgatgtggttttgaaggtctatcagaatgatgtgcaaaagggggtattgtcaatgaaattgcaggaaaagtttcaacatcccaatggaatggaaggtatggcagaagcggtcagaacaatcattcgggagcagagagagaatctgccaaaagatcagtaccgggtgcggttttaccggaaccgggagggaatgctcggggaggggagctgttataaggcatataccgtggaggagggacaatgtctgcagccgccggcagaaccgggaggcgatggtgtggtatttgccggatggcatgactggaatgattacgcggcggacttttcacagccgatagaagaaaatcgtgattattatgccgcctgggaatagatatgggaattgcagggaatacggcaaatttgtactgtgcgtatcatggcgccggatcatgacaggcagttgtagacttattgtagtttatagtttatactataaaagaagaacgcaataacgggaaaacaactgaaaaggagaaaatggggatgaagaaaagaggaatggcgattgtactggcggcggctgtgatcggaatgagtgtgattgcaggaagctttacgacggtgagggcggcagatgaggcggggatccgggcttttgtgacgcggatgtatgaggtgtgtcttgtcagagagccagaggaggctggtttaaatgactggtcgaaccggcttgcgacgggacaggaactgggagcggatactgcattcggctttattttcagcgaagaattccggaatctgaatctctgtaatgaacactatgtggattctatgtatgcagcattttttgaccgggagggagatgcagcgggaaaagcagactggttaggacagcttaatggcggtgcgaccagagggcacatcatgacgggatttgtcaattcgcaggagtttgcaaacctgtgtgcagcgtacggaatcacacagggatccggggactggagtgcagatgatattccggtcaatggaacatgcgcaatctgcgagagaaacggaaggattgaggcaacgtcggagatgcgggcgtttgtggagagattgtatacctgttgtctggagcggtctgccgaggaggatggattgaatgactggtcaagagcacttgcaagcggagcagagggcagcgaagtggcatccggttttattttcagtcaggaatataagaaaaaggatgcatccgacacacagtatgtgctgatgctttatagaaccatgcttggaagagaggcggatacaccgggcgttacagactgggtgttgcagcttagaaacggatcttcccgggaagcggtatacaatggatttgtcgggagtgcggaatttgcggctctctgccagaatgccggaattacagttggcggagcgattgcggataatgggacgacaggaagagtgagcacgggggaaagggtgcttgtgcaagtagatgagtatgtaaatggggtgtatggagattcgtatacattttatgcaacagaaggtgagataattcatttggaagatgatattcatctttatccgggggccacagtaactgtagaagcggatacatttgttgcatatgaaggagctgttggaaaaacaaattggattggcaacgttgtctttgattagaagggaggatactctttgaagagtaaacttataaaacagaaaaggtggtggctaaggggcatccttatggtattgtttgccgtagggatgttttttataacgatgaatgtgcaaacagaagccggaacattgcaatatcgtgcagaaatcagcagtagcaccagagaaaataatattacttttgtttgcaatctaaatcagacaatagatgggcaacaagtaggctatcaatggcaagaaaataaaggaagtggctggcagaatatttttggagcaacaggagcttcttatccagtaaacagagttggaaaagccggttatcaatatcggtgtacgctcacgattacagtcaataattcttattcactgatgaatgaatgttataaggcgtttttacataggcagggagttgcgtctgaatttcagcactggtggccgtatctgtatgaacatacgcaggatgagtatctggtgacagtatataatgcgttagaaacgccaccgcagaatgaagcagctcgagtagccatggagattgtattcagcgatgaatacatgaaaaagtataaaaataatcggttagattacaatacttctgtaaatggagatactttaaatggacctaaacagctaattgtcgatagctatcgatttttattacaacgagaaccatcggtggatgaagtggaattttggtatagcgagtatgaaaggaataacggtagaccgcagaaatttggatatccagatgcaaataatgtaactcataaacatgatacatattccggcatgggttatgttatcaatgcgattgcacagtccgaagagtgtgccaacaaaatggcggcagcatatcactatgatggagtacggggggtgttcctttatacagaaagtgatattgaatatcaggcagatatataccatgtcacaagcgatgttgccacaatccccgaggaagcatatcgggtgatattgcagaaggggacaggcattcaaagcgtcaccggagcaggaagttatgcgatggggcagagagtgacaatcgatgcaacaccggcaaccggataccactggaaaagctggatgggaacctatgaggcaaatacaaaatcttatacattccaaatgccggcgcaggatgtgattatgacagcgaacgcagagatcaatcactcgaccttgaggattgatcccaatggtgggagttggaatggaagtgcggatatacagaggtttagagagaattatggaaccgcaatgtcaattccggatccggtgagacaggggtatgtgttttcgggctgggtaaaatcggaagtgtttcacggaagcctgaatcatgctatgtatacgtttggagcggatgacggtgcggtggatgttttgacagcatcctggacggcaaacagttatacgctgcattttgatccgaatggtggcgtcgaagccgcacatatagaggatatggtaattcggtatgatgaggaaattatacttccggatgcagcggcagcttatgtgaaatatacatttgatggtcagaatgtaacgcaggacgtgttgagcggagcaatccggcagtatgcggcaggaacatatgagtcacttgatttggagaatgcagtgcttgaggcgttggaaacgatattaccggatgaacggaagaatgagatagaagatgagacggtggcaacgccggcaactggcgagaaaccagatgattcaatattagatgaaaaaaatgaaatgcgagctgcacaggcagatggagagccctcagatgatttacaaacagaaacggaagagcaagtggcggctgtgggggagaataatgcagaaacagggaatccggaaacggaaatagaaacagaaccggcagcagatcggagtgtatatgtgtctgtgaataccggctgggtgacagaggaagaaaaagaaaattatgttccgcaatggacagcaggaatgcaggtcagtgtggcggatctgatagaagcatccggtgtggcagatcagaacggtgcgatgatcacgctgtatgcgtcgtgggatgactgtccgtggattgttgccacaaatctctactatacactggagcaggcacagcagggggttatcacagacagtgagattttaagccatgcgactgcatcggatcgtgaagatggaagcccgatcgaggcaggatttcatgaaaatggaacatctttttcgattccggattatcaggcatcggattttactcagtttttgcgtggaggaagctgtacggaaaatctcacggtagttgacagcgctgggagtatctattgtaagcagataacggtttatgtggtggatacaacgcctgcagatgcacgaacggagagaacaacacgctttattgatgaaaaatattacggaagttcttatgaacggggagggcttttggatgattcgatctggaagacggatactgcgtacgtgtctgcacttcggacggcgtttggaaatctggaaaatgatgcaccggttgaaacctatatgattaacggtgagacgcgccggaagatccgcgaatatgtggatgcgcacggattcggagacaacagagaagccggagcattacaggaaatgtatgatcggtatcttgtgccaaattgtgtaagatgaaaataaaaaacagccggcaggcgtttcctgcctgccggctgcaactctttcattcttctgtgaggaagagcggagaggatattccctaatatattcttgttgattacggacagcccttatgtgtgttcttctgcatctgagaccggagcttccggcttcttgatatagatcttttcaatccggtttttatccatctgttccacacgaagcaacacatcatcatcggtaataatcacttcgttcttttccggaaggtgatccagcagaccgatgaggtagccgccaatcgtatcataatcctcggatgtaaaattcaagccgatctcatcacagagatcttccaggttggtggagccgagaaccatgtattcacggtcgctaagctggacaatcggatcttcttcgtcagtatcgtactcatcacggatttcaccaacaatctcttccagaagatcttccagcgtgatcagacccgcagtagcaccatactcatccagaacaatagcaagtgagatagaggacttacgcatttccataaacaattctgcagtgttcttgtgctcgtatgtaaaatacggttcacgcataatatcacgaacagaaaaatgatccttgtcgtgacagagaagcagatctttcatattgaggataccgatcacgttgtcggtcgtatcttcatagactggcagccgggtaaacttatcctcctgaaaaatctgaatcagctcatcgtaggaactgtctacttgcgcaaaggtcatatcgattctcggaatcatgacttctttggcctgtgcatcgccaaaatcaaacacattgttaatcatggtgtgttcttcagactcgatgacgccggattccttgctgacatccacgattgtgcgcagttcttcctcggtcatcttctgggtatcggcattcggatcaacgccgaataatttgcagatgcggttggcaagcttattgatgataaaaatgaccggagtcagaattttcatcagtacctcaatcacatttgcataggtgagagccagtttttcggaattgaccgtcgccagtgtcttcggcgagatttcgccaaaaatcaaaatgagtacggtaaggatgccggttgcaatacctgcacctacactgccccagatcttgattgccagagaagtggcgagcgaggatgccgacagattcacgatgttattaccgattaagattgcagaaagcatttttccggaattatctgtgatgcgaagaactgtggcagcgcgtttgttcccgtcttctgccagggtacgcatccggatgcgattgacggtaattaaagccgtctctgcggatgaaaagaatgcagagagcataagtaagagcactaagaaaattatttgaaatatgtcacttgaatccaagtatgttcacctcattaaatagcaggatgcgcacagatgtatgtgccatgcctttggttaatagtattccggcacacagggcgccggaatacaaaagtgtaatataaatgacattatataaagaaaatgtctattcgtcaatactgtagtttggagcttcctttgtgatgtggatgtcatgcggatgactctcacgaagagcagcagcggagatttttacgaacttgctcttttccttgagatcctcgatcgtcgggcagccacagtaacccataccggaacggataccgccgaccagctggaaaacagtgtcctccacattgcccttgtaagccacacggccttcgacgccttccggtaccagcttcttggcaccttcatggaaatagcggtctttgctgccgttctccatagctgcaagagaacccatgccgcggtaaaccttgtattttcttccctgatacaactcgaaagttccgggagcctcatcacatccggcaaagatacttcccatcatgcagacatttgcgccggctgcgagagctttagtcatatcgccggagtatttgataccgccgtcggcgatgatcggaataccggcttcctttgcaaccttatagcagtccatgatagcggtaatctgtggaacaccgatacctgcaacgatacgggtggtgcagatagaaccaggtccgatgccgacttttaccgaatctgcaccggcagcgattaagtcgcgtgttgcttctccggtagccacgttacctgcaatgacctgcagctccggataagcggtcttgatcttcttgacagcctcaaggatatttctggaatgtccgtgagcggaatccacaacaatgacatctacgtgagcctttacgagagcttccacacgttccatcatgttgccggtaatgccgacacctgcaccgcaaagcagacgaccctgctcatcctttgcggagagcggatacttgatctgtttttcgatatccttgatggtgataagtcccttcagatgaaaatctttgtcgacgatcggcagcttttcttttctcgccttggcaagaatcttttttgcctcttctaaggtaatgccttcaggagcagtgataagaccttcggaagtcatactttcactgatcttcttggaaaaatctgtctcgaactttaagtcacggttcgtgatgatgccgacgagcttgttattctcgcagatcggaacaccggaaatgcggaatttgcgcatcaagtcttcagcatcctgcagtgtatggcttggagaaaggaaaaatgggtctgtgataacgccgttttctgaacgttttaccttgtcgacttcatctgcctgagcctgaatggacatatttttgtggataataccgataccaccctgtcttgccatggcaatggccattctgtgctctgtgacagtatccattgcagcactcatcatagggatattgagcacgacctttttggtaaggtgtgtcgttaaattaatcatgttcggagttacttctgaatactgtggaaccaaaagcacatcatcaaaagtaattccttcaccgataattgttcccatttttattttcctcgctttccttgtataaatgtttgttaaaaaagtatattagtttctctataatagcaaaaaaaaatgtgtgtgtcaatgtagtataagtgtcagttgataaaaaaatatattgataagttagactaatatataaaaatattcacaaacggacagatgtgtgctatgatggcagtgggcgacggagccactgttacagggggtacgttgcctaaatttatattacgagagcagtgtataaggaggcagtatggagtttcgtccctgtattgatatacataacggcaaggtcaagcagattgtcggcagcagtcttgcggatgagggagaccgggcagtggagaattttgtcgccggagcggatgctgcgtattatgcacatctatataaggaagcgggacttcgcggcggacatatcattctgttgaattcgcgagacagtgcgtactatgaggcgacaaaggcacaggccctgcaggcgcttgcggagtatccgggcggacttcagatcggaggaggcattgatgctgcgaacgcaaagcagtttctggatgcgggcgcaagtcatgtgattgtcacctcctatgtgtttcgtgacggaaaaattgactatgaacggcttgcaacattgaggaaaaatgtcggaaaagaacatctggttctggatctaagctgcgcaaagcgggcggatggttattatattgtgaccgatcgctggcagaaagatacgagggaacgtgtgacaacagaacttttggaacgcctcggcagtgagtgtgacgagtttttagtacatgcggtcgatgtggagggtaaggcaaacggtattgagagagaacttgcaagtctgcttggctcctggggcaggataccggttacctatgccggcggagtgcgggactttgatgaccttgcacttttgagagagcttggatgtgacaggctgaatgtgacgatcggaagtgcactggatttgttcggaggatcgatgccttttgaaaaagttacagaatattgcagatagcaggagaagaatcgcgacagtgagaaaagatcacggcagtgaggaaggaacttgacagtgagaaaagatcacgacagtgaggaaagaccgtgacagtgagaaaagatcacgacagtgaggaaagaccgcgacagtgagaaaagatcacggcagtgaggaaagatcatggcagtggaagatggaggagaagaaaatgagcaagtacacaaagcaggatattatccgaatcgtggaggaagaggatgtggagttcatcaggctccagtttaccgatatgttcgggacactcaagaatgtggcaatcacgtccagccagcttgagaaagcattgaacaatgaatgtatgtttgacgggtcctccattgagggatttgtgagaattgaagagtcggacatgtatctgtatccggatctggatacgtttgtaatctttccgtggcggccacagcagggaaaagttgccagaatcatctgtgatatttataccgcagaccgcaaaccgtttgagggagatccgcggtatgctttaaagaaggcggtggcagatgcggaatctatgggataccgttttgatgtcgggccggaatgtgaatttttcctgtttaatcaggatgaggatggacagccgacaacgatgagcacggagcgtgccggatattttgatctgggaccggttgatctcggggagaatgcaagaagagatatggtgctgacattagaggatatgggctatgaaatagaggcgtcccatcacgaggtggcaccggcgcagcatgagattgactttaaatatgacgaggcgttaaaaacagcggacaatatcatgacattcaagcttgcggtaaagaccattgcaaagcggcacggcatgtttgcaagctttatgccaaagccgaagtacggggtgaatggttccggaatgcatgtgaatatgtcgctttccaaggaaggtcggaacatttttgacgatccggacggggagaacggactgagcagggaagctcactggtttatcggtggcattatgaaccatatgagagccatgactgcaattaccaatccgcttgtcaattcctataagcgtcttgtcccgggatatgaggcgccgatttatatcgcatggtccatgacaaaccgcagtccgctgatccggattccggtatcgcgcggcagcagaaccagagtggaactgcgctgcccggattcggcagcaaacccgtatcttacgctcgcggtgtgtctggaagccggactggatggaatccgccggcagatcgatccgccggctgccgtgactgagaatatattcgagatgcggctgtcgcagattaagaagcagggaatcgaatcacttccggcggatctgggagaagcggtcgaagcatttaaggcggatccttacattcgggaagtgcttggcgaacacatcagcgagaagtacagcgaggcaaagatggcagagtgggcagattatcgtgcgcaggtgacaggctgggaaattgacaattacctttataaaatatagagcctggatgcaaaggggatagaattgacaaatattattgttgcatttcccaaacaggataatgcccgcaatatcaaaaaaatactgatgcagaacggtcatcatgtcgatgcagtctgcagcaccggagcgcaggtgttacagagcgccggtgaacttggcggcgggattgtcgtgtgcgggtatcgttttgtggatatgatgtacacagaactgcacgaatatctgccggtacaatttgaaatgctgttggttgcgtctcctgcaaactgtggaaaccgggatgtggagaatctggtctgccttgccacgccgcttaaggtaaacgagctgttagatacggtggagatgatggaatataccatcaccaggcgcagaaaaaagttgaagcagattccgaaggagcgcacgaaggaggaacaggagctgataaatgaggcaaaagcacttctgatggaacgtaacaatctgtcggaggaagaggcgcatcggtacatacagaaacgcagcatggataatggaaccggtctgacagaaacagcccagatgattttaagtttgcttgcctgatgagtgagagagaggattgccgcagatgcggcggtcctttttttgtaataggaaatatcgttcctgttatacaaaaacgctccgcggggatgcatacccgtgcgaataggaaaagtcgcagacaggagaattttgtttaccaggaatcaaaaagtgcttgcggattggatttaagtatgagataatgggtgacagagagtggcaatgcgttgtgtcgttggcgacattttgaaagagaacgaattctgtatggaaggaataaggagagagacatgtacaagatcaatgataattatcagaaacttccgggaagctaccttttcagtacgattgcaaagaaggtaaatgcctacagcgaagcaaatccggacaaaaagattatccgccttggcatcggtgacgtgacacagccgattgcaccggcaattattgaagctatgcataaagccgtcgatgagatggggcatgcggagacttttcacggatatgcaccggatctgggatatgaatttctgcgcagcgcaatcgtgaagaacgattatcaggcaagaggatgcgatattacggttgatgaaatttttgtatcggacggagcaaagagcgattccggtaatattcaggagatttttgcacagaataaccgcattgcagtgtgtgatccggtctacccggtatatgtggattccaatgttatggcgggacgtaccggtacttatgatccggagacggagatgtggagcgatgtgatctacatgccgtgtacgatggagaataattttgtgccggagtttccgaaagagacaccggatatcatctatctgtgtctgccgaacaatccgaccggtaccaccatcacaaaagatcagctgcagggctgggtagattatgcaaataagaacaaagcggtcattatttacgatgcagcgtatgaggcttatatttcagaggaaaatgtggcgcactccatctatgagtgtgagggtgccaagacctgtgcgattgaactgaagagtttctctaagaatgccggttttaccggggtgcgtctgggttatacggttgttccgaaggaattaaagtgtggtgaggtatcgctgaatgccatgtgggcaagacgtcacggaaccaagttcaacggtgcgccgtacattgtgcagcgggcaggagaggctgtttattccgaggcaggaaaggcacagttaaaagagcaggttgcttactatatgaagaatgcgaaagcgatcaagcagggattaaaggatgccggttacacggtgttcggtggtgtgaatgcgccgtatatctggctgaagacaccgggagagatgacttcctgggaattctttgacgatctgctcgcacgtgccaacgtggttggaacacctggttccggattcggaccgagcggtgagggatatttccggttgacggcattcggaagctatgagaatacactggcagcgttagagcgcattaagatgctgtaggaacattacaacaaaaagcattagacagaggagacatggcgagtgaagaccgtgtctcctttttgcaaatacaaagaacgccggattgagaaaatttgctgacgggtattgtgtcaaaggattttaggaaaggtgtctgttgatttcatgagaggagaattaagtgctgtttcattcgttttcattccttttgtttttccctctggtgacgggaatgtattttctgataccaaagagggcaaaacagttatggctgcttgtggcgagctattatttttatatgagctggaatgtgcagtatggctgtctgattctgcttgtgaccgcaatcggttatggtggcggacttttgctggcacaaaataaagtacgacaagggaagagacgtctggcggtgctgaccggcagtgttcttctgtgtgtcggaatcctcttttttttcaaatattttgcttttgcagtgcagaatatcaacgaattgctccgtgcggtgggaagcgtgcgggcgttaagggtgcccgatctcattcttccggtcggaatatctttttacacgttccagaccatcgggtacctgatcgatgtctggaaagggaagacagaagcggaaaaaagtttcctgcgttttgcgctgtttgtgtcatttttcccgcagcttgttgcaggaccgatcgagcggagcagcagtctgcttgcacagctgcgggagccggcagagttcgactatgacagggtaaaggacggactgcttctgatgctgtgggggtattttgaaaaaatgtggattgcggaccgtgctgcgattctggtcgatcaggtctatcaggattaccggaattattcctccggcatgcttgtgtttgccacggtgctgtttgcggtacagatctactgtgatttcggcggttacagccatattgccatcggggcggcgcaggtgcttggcatccgcctgatggataatttccgacagccctattttgcagtgaattgccgggaattctggagacgatggcatatcagtctctcgagctggttccgcgactatctgtatttcccgctgggaggaagccgcggcagcagtgggagaaccgctgtaaacctgatgataacatttcttgtcagcgggctctggcatggcgcaggctggcactatgtggtgtggggagcaatccatggaagctatcaggtggcgggcagaggcatcagatatgtaagtgaggccgtacaaaagagactaccggagaaaaagatacgctttttttcggagaaaacgcggggactgacacgcgctgcccggatttgtgtgacatttattctcacggattttgcgtggctttttttcagggcagatcatctgggacgagctgtggcgatgcttcggcggattgtgcaaaatggcaactggctgggacagttttccgatggcacattatttggcatggggctttgcagactggaggtgtgtcagctggcacttgccatcggagttctgcttgtagtggatatcctgcatgaatccgggatttccatacgtgcctggcttgcaaagcaggtgcttgtgattcgttggagtatttacatgctggttcttctgggatttgtcgtgctgttgctgcagaattatggaagagcgtcggtggagtttctttattttcaattttaggaggaaggcatgaagcgttttacaaaaaagttgatcgcctttttgggaatatttgcggcagtgcttctggctcttgatttgttatcagcgacggagagatttcgcggtgcgtttgccgtgttgacagacagcagcggttacgaggaggaagccgagcgggaagtgtctgcgtatcttgcaaagagcagaatgccgggcagttacacgaagctgctggtcggtgacagtgtctgcgcacagatgacggaagcgttttttgattgtaatcaacaatactgtctggtcggaaataaccgcgcgctgaccatggcaggggaatatcttctggtaaaagaatttctggagacgcatgagaatgtctcggaagtctggctgatggcaggaccggatctgcttcagacatcgatcgatgccacatacagctattcttatgtggttcttccgtttttgcaggcggatctgctggacgaacttgacgaggagaccgcagaggaaatggaggagacgttcggaagcctttttctgaaaaagccggtggcagaactaatcgccggttcggcggtaaaccgcaagttgtatttgaattacgtgaaggagcgggaggaggcgttggagaaaggggaaagcagagagaaccagacagtcggcatgtctgatctggcagagcgctatctgcgaaaaatctatgaattgtgcgacgcgcagggggtggcatgctatctgatccccgatccgctggcagatacaccggcgcgccgcaagcaggtggagcagatctggcaggattttgaaacacggggattggagcggcttttcctggattatttttctgaaattacctattatccggcggaccagttttcggacggaattcattttggcagaccgtacaatacaaaggaagtgtaccgcgaaaaattaagagaactgtatctggacagagggtatctggatggatttcaaatatgagcctgaacggagtctgcttcctgttttgtgtagaatgcagcacaaagaatggatggaattatagccgggcagcagtgtggtgccaaatgtggcactcgaaagaaatacgataaaaagcttgacaaaacacgatatcaatgtataatacaaaatgcaaatgagttgcaaatgcatacaaattgcaaaaacgaatgagttgcaaatgtgtgcggcatgcaggtgggataacgcattgggaagcgctatgacagtgcccgggaggaatgattttatgctggatgtattattggatacagtgcttgacagtgtcaggcttttgccgtttttatttttgacttatctttttatggagacattggaacatcatacgggaagcaagctgagccggaagatacagttcgccggaaaatggggacctgtgtggggcggtctgctcggtgtgattccgcagtgcgggttttcggcagcggcatcgagcctttttgccggaagagtcatcacggtcggaactctggtcgctatctatttgtccacttcggatgagatgcttccgattctgatttcggagtcggtgccggtagtgacgattgtgaaaattcttggcagtaaggtgatcattgctgtgctgtccggtctgattgtggaactggtatatgtgagactcttgaagaaacaggagaaggagatggatattcatgtcgtgtgtgaggaggagcactgtcattgcgaggatgggattgtggtttccgcgcttaagcatacggtaaagattttctgttttattttcctgatttcactggtattaaacggtgtgatcgggctgatcggagaggaaacgctggcgggactgttttccggacttccggttgtgggagagctgattgctgccctcgtggggctgatcccgaactgtgcgtcgtccgttgtaatcacacagttgtatctggatggaattatccggtcgggcgccatgatggcaggacttttggtgaatgccggtgtgggatttctggtgctgttccggctgaaccgcgactataagcagaatgcggccatcatcgctaccatgtatgtgctcggtgtgctctggggagtcatgattgaagcatgtggaattgtattttaggagacagggatatggtttcacagacttttgccgaagcgtaaaaatgtgatataatgttcgcgaaggcaaaagttcacatggaacggagcaggatgccatgcttgcatgaggcagcctgctctgttccatgtgaacgcgcccgcgagtccgggaaaacggagtttttccggacttttgccgaagcgtagttgatataatgaactctgacgatttcatattagaagttcctgcggaacttcggatgcgcagaagtcggcgcagaaaagatgatataatgaaaatagatgcagttgcggagggatgagatggcagggagtggatatgcgacaaacagccgcagaaagattcttgattttttaaaaaacaacagtgatcggaccgtgacggcggcggatatcgatcaatatctgaagcgaaacggcgatgccgtcaatatcacgacgatttaccgttatctggataagcttgccacagacggcaccgtcatgaaatatgtggcggaggcgggaggaaaggcagtgtatcagtacgtggaact
